United States Patent Application Publication US 2026/0193644 A1 - sequence listing, part 11

SEQ ID NO: 27106 - protein, 84 aa, Homo sapiens
LGGFVFWFIQLWQMVTEPAVSFLGVGDDGERGKNRPLAGPWLGEVLRSAGTLRALCVYRPIPAPTTPSLRPRKIRYAATHHSPA

SEQ ID NO: 27107 - protein, 43 aa, Homo sapiens
MNAGKIEQSRAPVLWYLCSLPQRESEHYQLSAHPSHFITKARM

SEQ ID NO: 27108 - protein, 44 aa, Homo sapiens
LCWLPPKREQLSRMLAGGTTCWPETRLPGVGQPMLSGDIHLHLC

SEQ ID NO: 27109 - protein, 32 aa, Homo sapiens
LCWLPPKREQLSRMLAGGTTCWPETRLPGVDT

SEQ ID NO: 27110 - protein, 35 aa, Homo sapiens
LDLGQVGGVGVCHWARRRGLGQKRREAGEIWTRDV

SEQ ID NO: 27111 - protein, 117 aa, Homo sapiens
VPSVPKPPTARTASPRGLSLIRRARKGLRLTRDPPLPSSSLPTSSSHLLSLEKLPPPRCLPGFGVTRQRQRHRGCPAAHRSTHLPGLLELRTRETMQLRQALGCFRGADIRGDFSWD

SEQ ID NO: 27112 - protein, 183 aa, Homo sapiens
LALATGFPGAVLSQELHSAGHLQKTVFRVYFLLSSTQSPTAANARGQKMFGGRKTKAGSGGGLTVRVCLQRREGAGSVSSCFSKLQGPGSPLQGRAPLLPARHWRWPPGEEKANACARLVRRKRLTRRFGQQNRPSLSEASSDLARKVGEGGLAQSLRDPPLWGLPSLSLTLLSTAFAGGISE

SEQ ID NO: 27113 - protein, 116 aa, Homo sapiens
MWGSSWKTKRSPTHAVLGTASALQLMRHFLLGLTHHSYAAQTGSRDSLLFLRAKSSAENRIEIHSTDFFARRQGWRTTSTGSLFCSFLMRPKAIYLELLHNTTLKDIILPIINSVK

SEQ ID NO: 27114 - protein, 29 aa, Homo sapiens
LICFQCRVHLKDLTYHQSIEKHARKTRWA

SEQ ID NO: 27115 - protein, 48 aa, Homo sapiens
LFYPQLKMDRVLLVISLPPLPPSWMPSRSCLQPCTPQRALKPSPPHFP

SEQ ID NO: 27116 - protein, 102 aa, Homo sapiens
LASPWNLVCNHGANCRTRGREVDGEPFSWQYPEAVLVKRLDSERPERYHTNAVAWRRSGVPLPRDCRRPAAKRVVRGRRESPGPTEQPQGYGGTPEREGGHR

SEQ ID NO: 27117 - protein, 291 aa, Homo sapiens
LKLLEVEHPAAKVLCELADLQDKEVGDGTTSVVIIAAELLKNEDELVKQKIHPTSVISGYGLACKEAVRYINENLIVNTDKVGRDCLINAAKTSTSSKIIGINGDFFANMVVDAVFAIKYTDIRGQPCYPVNSVNILKAHGKSQTESMLISGYALNCVVGSQGIPKRIVNAKIACLDFGLQKTKMKLGIQVVITDPEKLDQIRQRESDITKERIQKILVTGASIILTTGGIDDMCLKYFVEAGATAVRRVFKRDLKRIPKASGATILSTLANLKGKETFEAAVLGQAEEVV

SEQ ID NO: 27118 - protein, 97 aa, Homo sapiens
VTLESLSLPPQFVCWSLGGPGPARLSYPASNGAAAHDGTTPGPQPGPSPHTLCLLELSAILGAQGRAGFVRTSSAAEPHPEESQLILEGIGNSVTGK

SEQ ID NO: 27119 - protein, 60 aa, Homo sapiens
LSKFETSLVALLEGVRNFQFWAWAVGLADRPLALGLGARFSASRMRSFAVHQDLGPSGIS

SEQ ID NO: 27120 - protein, 24 aa, Homo sapiens
LREDTFSGCQAVPWNLCRDEACLC

SEQ ID NO: 27121 - protein, 35 aa, Homo sapiens
VGAVAEVTVSKWKSLLSQQLLCKMPRVHETGRRPC

SEQ ID NO: 27122 - protein, 22 aa, Homo sapiens
LGPTCCLTIPEPSVHETGRRPC

SEQ ID NO: 27123 - protein, 17 aa, Homo sapiens
VEELTVTATPLQDAPCP

SEQ ID NO: 27124 - protein, 20 aa, Homo sapiens
VISEPPGIVAEHPRPAEVPP

SEQ ID NO: 27125 - protein, 41 aa, Homo sapiens
VGAVAEVTVSKWKSLLSQQLLCKMPRPGIVAEHPRPAEVPP

SEQ ID NO: 27126 - protein, 28 aa, Homo sapiens
LGPTCCLTIPEPRPGIVAEHPRPAEVPP

SEQ ID NO: 27127 - protein, 39 aa, Homo sapiens
VEYRSRWEVWMGRRWMPSSSCLGVRCVKGLAGMRRVLLA

SEQ ID NO: 27128 - protein, 29 aa, Homo sapiens
LVSSHSPQQGLVLSESGLPDSLSVGDLGE

SEQ ID NO: 27129 - protein, 32 aa, Homo sapiens
VLSDLFNNLIRLSLPRHLPFFLSQKGSFPESH

SEQ ID NO: 27130 - protein, 41 aa, Homo sapiens
LQRPQLCLPGTRPAFSLNHYFMGKMKSTSCAWSTYSFRSDF

SEQ ID NO: 27131 - protein, 29 aa, Homo sapiens
VEELTVTATPLQDAPVNHVAETPTLPSWN

SEQ ID NO: 27132 - protein, 13 aa, Homo sapiens
LHLFPSRWEPWLR

SEQ ID NO: 27133 - protein, 11 aa, Homo sapiens
LRLELTAFVPF

SEQ ID NO: 27134 - protein, 13 aa, Homo sapiens
LGPTCCLTIPEPR

SEQ ID NO: 27135 - protein, 11 aa, Homo sapiens
LADLYSVLRTS

SEQ ID NO: 27136 - protein, 59 aa, Homo sapiens
MSDTHGSTWTHQPCSYGSTQKPFSLEDSSDPPCDFIQSAASNCYLTIPTPSARLPLKNL

SEQ ID NO: 27137 - protein, 107 aa, Homo sapiens
LDMEFQTLLLGTEQNFEDALILSSHEGSVQEQVTKWRPETKRTNELSYRDLLVLLPLFTTRRQTSLIFKKLLFDLSESQPRNHGCMIFDLDFEDSFYKEKSEQWPRR

SEQ ID NO: 27138 - protein, 102 aa, Homo sapiens
LTLLLGTEQNFEDALILSSHEGSVQEQVTKWRPETKRTNELSYRDLLVLLPLFTTRRQTSLIFKKLLFDLSESQPRNHGCMIFDLDFEDSFYKEKSEQWPRR

SEQ ID NO: 27139 - protein, 88 aa, Homo sapiens
LITEIRSSWRKAIEMEENRTKEPIQMDAEHREVLPESLPVLHNQREFSMADFLLETTLSDFGQSHSTEEKVISDCECVPQKRADQSHR

SEQ ID NO: 27140 - protein, 147 aa, Homo sapiens
LESVKPNLDVVSPVSAKKDISEADLRIVMCAMYGDPFSVNLIPSPFPDSHSCSAAQAGQNNSLMLDKIIGEKRRRIQTTILSYHSSIGVRKDELVHGYILIYSAKQKASMGMLRAFLSEVQNTFLYSWWQLLIAKQIFFLKTRLSKN

SEQ ID NO: 27141 - protein, 215 aa, Homo sapiens [sequence omitted]

SEQ ID NO: 27142 - protein, 201 aa, Homo sapiens
LEYSVIRLCNWSSPRKRQAVGVGSLPKAIPELALFWVPPRWNLGKTYSIVLGSGQVVLGMDMGLREMCVGEKRTVIIPPHLGYGEAGVDGEVPGSAVLVFDIELLELVAGLPEGYMFIWNGEVSPNLFEEIDKDGNGEVLLEEFSEYIHAQVASGKGKLAPGFDAELIVKNMFTNQDRNGDGKVTAEEFKLKDQEAKQDEL

SEQ ID NO: 27143 - protein, 34 aa, Homo sapiens
LNTIVKSVHEEMMLLGRKKKGNNNLQEPLHLNSA

SEQ ID NO: 27144 - protein, 332 aa, Homo sapiens
LIDSWSKLIKNADIKNAQEALQAIETKVALMLQLLIHEEDDISPNIIGFCYYYLHIWKQLTVLLDQQKANVEAIMLAVMKKLTYDEEYNFENEGEDEAMFVEYRKQLKLLLDRLAQVSPELLVASVHSVFSSTLQDWQTTWFMEVEVAIRLLYMLAEALLVSHGVPFAGDVSKASALQDMMRILVTSRVSSYQHTSVTLEFFKNVVRYEKFFTVEPQHIPRVLMAFLDHRSLRHSSAKVRSRMAYLFSRFVKSLNKQMNPLTEDILNRIQDLLELSPPENGHQSLLGSDDQLFIYETAGVLTVNSEYLAERKQALVRNLLTPLMEKFKILLE

SEQ ID NO: 27145 - protein, 203 aa, Homo sapiens [sequence omitted]

SEQ ID NO: 27146 - protein, 116 aa, Homo sapiens
VSRDRAITLQPGRQEQNSISKKKKKRKEKKKTKSKNTATPSMPGEERTALPLPEGTNSIRNPQSQCMLGIVVRQPVTNGRKWLGDYSSQHAWRGAHRAGPLSWDTHRLQSWFMLGL

SEQ ID NO: 27147 - protein, 184 aa, Homo sapiens
VKLTLEGLEEDEDDRVSPTVLHKMSNSMEISLICDNEFQCRHSQLECGYGLQSDRWTEYSIQTMGPDNLELIFDFFEEDLSEHIVQGDALPGCVGTACLLSSTIAESGKSAGILTLPIMSRNSRKTIGKVRVDYIIIKPLPGYSCDMKSSFSSIGSQEYHWMLAIEVWETLQLPSWLKKILLLL

SEQ ID NO: 27148 - protein, 133 aa, Homo sapiens
LNARELILEGNPTHVKNVAKLLTGSHTFLNIRGFILERNHTTVKNVKKLLCMAESLPKIRKFILERNATNVKNVPKPLTRAHILLDTREFILESHPTNVKNVVKPLTGSQTLLNIREFILERNPRNMKNVISL

SEQ ID NO: 27149 - protein, 288 aa, Homo sapiens
VMNGAVLQQVFVVDYAVQSQICGDCHRVEAKGFWRAVIQVRQKTLHKKAFYYLEQLILKYGRHQNTLRIKEIHDGLDFYYSSKPHAQKMVEFIQYTVPCRYNASQRLISQDVHSNTYNYKSTFSVEIVPICQDYVVCLSPKLTQSLGNMNQICVCIRITSAIHLIDPNTLQVADIDGSTFWSHSFSSLCHPKQLEEFIVMKCSIVRNIKHGADAGMISKKHTLREVWVQKTSEMNTDKQYFCHTHLGHLLNPGELVLGFDLASCNLNDEHGNKMNSDRVPDVVLIKKN

SEQ ID NO: 27150 - protein, 73 aa, Homo sapiens
MLASLGWGSSHGCYPEIRISSCFHSPHHFQAISCIIDLVSLHNPIFLRGFVHSSLFFFHCSCLSDFRKPVLRP

SEQ ID NO: 27151 - protein, 157 aa, Homo sapiens [sequence omitted]

SEQ ID NO: 27152 - protein, 54 aa, Homo sapiens
LHFQSHQSILWILCVCGLIIIVTTIIPFSPFCLQETYLKFFLFCFCFFVFCFPL

SEQ ID NO: 27153 - protein, 48 aa, Homo sapiens
LSCAAAAFFSLSLGLPLHPPCRVTGLVPWAGRNTSMWPQTSESFLLAH

SEQ ID NO: 27154 - protein, 30 aa, Homo sapiens
LPMSKPRYEEGWWGAGPLNREDQHPVLLTI

SEQ ID NO: 27155 - protein, 473 aa, Homo sapiens
LGKQRDSLGRWPWPQALPWCRCTPAPQLWLWQDGLGTWHPYSATICSFIEQQFVQQKGQRFGLGSLAHSIPLGQADPSLARYIIDLPSWTQFRQDTGTMRTVRRHLFPQHSAPGRGVVWEWLSDDGSWTAYEAGVCDDLEQQVARGNQLVDLAPLGYNYTVNYTTHTQTNKTSSFCCSVRRQAGPPYPVTTIIAPPGHTGVACSCHQCLSGSRTGPVSGRYRHSMTNLPAYPAPQHPPHRTASVFGTHQAFAPYNKPSLSGARSAPRLNTTNAWDAAPPSLGSQPLYRSSLSHLGPQHLPPGSSTSGAVSASLPSGPSSSPGSVPATVPMQMPKPSRVQQALAGATPKPEPEPEQVIKNYTEELKVPPDEDCIICMEKLSAASGYSDVTDSKAIGPLAVGCLTKCSHAFHLLCLLAMYCNGNKGPEHPNPGKPFTARGFPRQCYLPDNAQGRKPPGASRTRRHWLTFRPPHSC

SEQ ID NO: 27156 - protein, 487 aa, Homo sapiens
LWLWQDGLGTWHPYSATICSFIEQQFVQQKGQRFGLGSLAHSIPLGQADPSLARYIIDLPSWTQFRQDTGTMRTVRRHLFPQHSAPGRGVVWEWLSDDGSWTAYEAGVCDDLEQQVARGNQLVDLAPLGYNYTVNYTTHTQTNKTSSFCCSVRRQAGPPYPVTTIIAPPGHTGVACSCHQCLSGSRTGPVSGRYRHSMTNLPAYPAPQHPPHRTASVFGTHQAFAPYNKPSLSGARSAPRLNTTNAWDAAPPSLGSQPLYRSSLSHLGPQHLPPGSSTSGAVSASLPSGPSSSPGSVPATVPMQMPKPSRVQQALAGMTSVLMSAIGLPVCLSRAPQPTSPPASRLASKSHGSVKRLRKMSVKGATPKPEPEPEQVIKNYTEELKVPPDEDCIICMEKLSAASGYSDVTDSKAIGPLAVGCLTKCSHAFHLLCLLAMYCNGNKDGSLQCPSCKTIYERRRGPSPRERWRYYGSRCRSPATRTAGPSS

SEQ ID NO: 27157 - protein, 38 aa, Homo sapiens
LRVLSGPHPIIAQHTPFNMRGHPFIALRPERSHRPAKH

SEQ ID NO: 27158 - protein, 54 aa, Homo sapiens
LSKPLLSPCLTHLSRRGSLQCLITASTSLMVSPATGVSFTSSSSSSDTNLLPLS

SEQ ID NO: 27159 - protein, 69 aa, Homo sapiens
VFDHGQHVPDGEPRHGGLVHLQQQLLRHQFAAALIGHLAGLHLPQCSLLFARFASKRGEDRGKRMQGGC

SEQ ID NO: 27160 - protein, 37 aa, Homo sapiens
VLLADIHGSCSGRCSLLFARFASKRGEDRGKRMQGGC

SEQ ID NO: 27161 - protein, 46 aa, Homo sapiens
LDLWRAWCHISGSASVLARDPACSLLFARFASKRGEDRGKRMQGGC

SEQ ID NO: 27162 - protein, 55 aa, Homo sapiens
LDLWRAWCHISGSASVLARDPAVCIQERGGQGQKDAGRLLISTEELISCETLTVI

SEQ ID NO: 27163 - protein, 32 aa, Homo sapiens
LVRKLRYTRMNFCKATNLVNSEANVQTQVVRL

SEQ ID NO: 27164 - protein, 31 aa, Homo sapiens [sequence omitted]

SEQ ID NO: 27165 - protein, 29 aa, Homo sapiens
MYLSMKLRLRNQCLQEPGTALGLCRVERW

SEQ ID NO: 27166 - protein, 22 aa, Homo sapiens
MVMTCGFQHSSPSPGTLWVCPA

SEQ ID NO: 27167 - protein, 45 aa, Homo sapiens
MWFPAFLTQSRDTVGVPSLSPVTGNTSPSSGEFELQRYIWEHFES

SEQ ID NO: 27168 - protein, 7 aa, Homo sapiens
LYYDVKT

SEQ ID NO: 27169 - protein, 31 aa, Homo sapiens
MLRNSGILGLVRRSFRGLDSSKHMYRNAYFI

SEQ ID NO: 27170 - protein, 34 aa, Homo sapiens
LEMIWEHGEEREEGAKSDHLNLSILDHFMLESPE

SEQ ID NO: 27171 - protein, 39 aa, Homo sapiens
LGKEMNILYCKIVRNNQMCFLVSGKACFKKFNEKFIMLA

SEQ ID NO: 27172 - protein, 34 aa, Homo sapiens
LLLFDKQEDKSFPIKMMEQKNRRGLDSLPSHFLL

SEQ ID NO: 27173 - protein, 71 aa, Homo sapiens
VLISFNLGIFPWILTCISEEMAFRTICVLVGVFICSICVKGSSQPQARVYLTFDVTKRRHRNTSSPLSIRE

SEQ ID NO: 27174 - protein, 45 aa, Homo sapiens
VSWKVLVGDGAKRHLRRREEKAAPLDKDKLPGRRMRRQETNCLES

SEQ ID NO: 27175 - protein, 57 aa, Homo sapiens
LVTILFTLSKPELKPMHQLMMTAESGRAEDPKSFPRLAENKLPGRRMRRQETNCLES

SEQ ID NO: 27176 - protein, 41 aa, Homo sapiens
LVTILFTLSKPELKPMHQLMMTAESGRAEDPKSFPRLAESE

SEQ ID NO: 27177 - protein, 60 aa, Homo sapiens
MMLGSLAPDPGSRRHSGQAALRPRRYPTLWDRCRKRWLRPIFTQLLAAGLTTKDSESWQV

SEQ ID NO: 27178 - protein, 23 aa, Homo sapiens
MQEAMVKTHFHPTSRRRFNHQGL

SEQ ID NO: 27179 - protein, 31 aa, Homo sapiens
MMLGSLAPDPGSRRHSGQAALRPRRFNHQGL

SEQ ID NO: 27180 - protein, 18 aa, Homo sapiens
VSWQKNSDHTDSYLGSFL

SEQ ID NO: 27181 - protein, 55 aa, Homo sapiens
MMLGSLAPDPGSRRHSGQAALRPRSEPLFAAPGEHLHQCFVKESYCPPRVLAKEQ

SEQ ID NO: 27182 - protein, 28 aa, Homo sapiens
MQEAMVKTHFHPTSRRRSGLPHAPPHSQ

SEQ ID NO: 27183 - protein, 36 aa, Homo sapiens
MMLGSLAPDPGSRRHSGQAALRPRRSGLPHAPPHSQ

SEQ ID NO: 27184 - protein, 42 aa, Homo sapiens
VGPDPVSSGRLGPRLYSGLRAWEGLAGCQMSCPNSAGLQLPA

SEQ ID NO: 27185 - protein, 231 aa, Homo sapiens
MAYPGHPGAGGGYYPGGYGGAPGGPAFPGQTQDPLYGYFAAVAGQDGQIDADELQRCLTQSGIAGGYKPFNLETCRLMVSMLDRDMSGTMGFNEFKELWAVLNGWRQHFISFDTDRSGTVDPQELQKALTTMGFRLSPQAVNSIAKRYSTNGKITFDDYIACCVKLRALTGEFYKVVSSPQAKTQFLLHFISQCFSTFILPKFFLALVVFFRLLLSISGKIIFWFFFQNLF

SEQ ID NO: 27186 - protein, 51 aa, Homo sapiens
LKLARPCFLCNLFKTLHAFGYLVISKNYVKIKLCLLIHGMYSFQSFVFDFV

SEQ ID NO: 27187 - protein, 52 aa, Homo sapiens
LPFFCVCVSFPEIAVLQPFWRDAEPFLRTNKHFKRFELPNHYGTRKPLAYEK

SEQ ID NO: 27188 - protein, 35 aa, Homo sapiens
LPFFCVCVSFPEIAVLQPFWRDAEPFLRTNKKVLI

SEQ ID NO: 27189 - protein, 93 aa, Homo sapiens
LDYHIFFYILNLTLRQFLFLLKEDESMNQPGPIKTRLAISQSHLMTALGHTRPSISEDDWKNFAELYESFQNPKRRKNQSGTMFRPGQKVTLA

SEQ ID NO: 27190 - protein, 45 aa, Homo sapiens
LILRRTPLVAYGSPSASPTELWRIAIWRPSSCCLLDRLCFSKETA

SEQ ID NO: 27191 - protein, 389 aa, Homo sapiens
LELAQVKADIDRRIHEKEEEFEATRKNHQRAIESLQASLEAEAKGRAEALRLKKKMETDLNEMEIQLDHANKNNSELVKTLKRLQQQIKDLQVQMDEDARQHEELRKQYNLQERRLSLLQTELEEVRSALEGSERSRKLLEQEVVEITEWHNEINIQNQSLLVVKRKLESDVQRISNEHEELISEFRLTEERAKKAMMDAARMAEELRQEQDHCMHLEKIKKNYEVTIKDLQAKMEEAEQLALKGGKRTIMKLEARIKELETELDGEQKQHVETVKTLCKNERRLKELVFQTEEDHKTNQRMQALVEKLQNKLKVYKRQIEEAEDQANQTLARYRKTVHELDDAEDRAGMAETALNKLRTRHRVAGKGITSVEIIQVSKTGTSKTLSEE

SEQ ID NO: 27192 - protein, 98 aa, Homo sapiens
VDFRSCVSEGKQLRREDEHKVGKSKNELEPKTRAGHSFTVSNFKDMSILARGADTFCHRTRHTHSSGIKKGEGRLREKLLPHPNKVNQLIGDKVDEPQ

SEQ ID NO: 27193 - protein, 23 aa, Homo sapiens
LRFKVLLRVLFFMAPVPPQVFGQ

SEQ ID NO: 27194 - protein, 127 aa, Homo sapiens
LADVSAVDSVFLGVILAPAKVVSRGGNPWAAVLYSWGLVQVSLLLQGALSLTPPAGRMGVQLDAGWETNVKTNAYALGVALALCRVHWHFVGFTSTLQVAPVLCRVHWHPGRFTGTFWGTRALCRVH

SEQ ID NO: 27195 - protein, 331 aa, Homo sapiens
MAASAKKKNKKGKTISLTDFLAEDGGTGGGSTYVSKPVSWADETDDLEGDVSTTWHSNDDDVYRAPPIDRSILPTAPRAAREPNIDRSRLPKSPPYTAFLGNLPYDVTEESIKEFFRGLNISAVRLPREPSNPERLKGFGYAEFEDLDSLLSALSLNEESLSNRRIRVDVADQALDKDRDDPPFGRDRNRDSDKTDTDWRARPATDTFDDYPPRRGDDSFGDKYRDRYDSDRYRDGYRDGPRRDMDRYGGRDRYDDRGSRDYDRGYDSRIGSGRRAFGSGYRRDDDYREGRDCYEDQYDRRDDRSWSSRDDYSRDDYRRDDRGPPPPKDPN

SEQ ID NO: 27196 - protein, 37 aa, Homo sapiens
LHSELANVPSTLDLNGDSHSLTGLQVSWLHPQTFILL

SEQ ID NO: 27197 - protein, 14 aa, Homo sapiens
LILLRSLPTPYSQP

SEQ ID NO: 27198 - protein, 11 aa, Homo sapiens
LLNQALEAKQI

SEQ ID NO: 27199 - protein, 44 aa, Homo sapiens
LQGIIGCHTTSNLDSIGPHPGYTQTRARARFRVSIESLERAFLS

SEQ ID NO: 27200 - protein, 137 aa, Homo sapiens
MPSGEGKQSVLIPTPVAGVCKPPLSSAGGSLDVCAHQGDLPAPELCPQVHLCLPKSARRDHFPCNAPQPNTRRVWHLGRNSWGGAVERVEVSGKTPTAAAPTVRAPAAQARASRSALEAAARTFPGAVSCQPAITQS

SEQ ID NO: 27201 - protein, 28 aa, Homo sapiens
LGTRLMSNRKAVAAGEKSPSCCTPPPPG

SEQ ID NO: 27202 - protein, 61 aa, Homo sapiens
LSLDRAQTLSIGQRWKFSFLLLLGPQNQSPPFPCSDKGHGKGFAGAKGGGGFSVPRQMGRG

SEQ ID NO: 27203 - protein, 52 aa, Homo sapiens
LDFMEKKKFIKQVTQFLQPLLWSNSVKQQNPAKFCLSLTRVLLKSGRRTIRR

SEQ ID NO: 27204 - protein, 48 aa, Homo sapiens
LISVLQQSLDNFKDILCLWPKLETSRHTHKTTIFKTRFDCFLDTTHEV

SEQ ID NO: 27205 - protein, 698 aa, Homo sapiens
VEIKQLFCRLDYKDTIAVARFIVFLASSSTSRDGKPCIFLKAFEDLKSTVYVYVKSLRDFSTESMSLVPATNYIYTPLNQLKGGTIVNVYGVVKFFKPPYLSKGTDYCSVVTIVDQTNVKLTCLLFSGNYEALPIIYKNGDIVRFHRLKIQVYKKETQGITSSGFASLTFEGTLGAPIIPRTSSKYFNFTTEDHKMVEALRVWASTHMSPSWTLLKLCDVQPMQYFDLTCQLLGKAEVDGASFLLKVWDGTRTPFPSWRVLIQDLVLEGDLSHIHRLQNLTIDILVYDNHVHVARSLKVGSFLRIYSLHTKLQSMNSENQTMLSLEFHLHGGTSYGRGIRVLPESNSDVDQLKKDLESANLTANQHSDVICQSEPDDSFPSSGSVSLYEVERCQQLSATILTDHQYLERTPLCAILKQKAPQQYRIRAKLRSYKPRRLFQSVKLHCPKCHLLQEVPHEGDLDIIFQDGATKTPDVKLQNTSLYDSKIWTTKNQKGRKVAVHFVKNNGILPLSNECLLLIEGGTLSEICKLSNKFNSVIPVRSGHEDLELLDLSAPFLIQGTIHHYGCKQCSSLRSIQNLNSLVDKTSWIPSSVAEALGIVPLQYVFVMTFTLDDGTGVLEAYLMDSDKFFQIPASEVLMDDDLQKSVDMIMDMFCPPGIKIDAYPWLECFIKSYNVTNGTDNQICYQIFDTTVAEDVI

SEQ ID NO: 27206 - protein, 644 aa, Homo sapiens
VEIKQLFCRLDYKDTIAVARFIVFLASSSTSRDGKPCIFLKAFEDLKSTVYVYVKSLRDFSTESMSLVPATNYIYTPLNQLKGGTIVNVYGVVKFFKPPYLSKGTDYCSVVTIVDQTNVKLTCLLFSGNYEALPIIYKNGDIVRFHRLKIQVYKKETQGITSSGFASLTFEGTLGAPIIPRTSSKYFNFTTEDHKMVEALRVWASTHMSPSWTLLKLCDVQPMQYFDLTCQLLGKAEVDGASFLLKVWDGTRTPFPSWRVLIQDLVLEGDLSHIHRLQNLTIDILVYDNHVHVARSLKVGSFLRIYSLHTKLQSMNSENQTMLSLEFHLHGGTSYGRGIRVLPESNSDVDQLKKDLESANLTANQHSDVICQSEPDDSFPSSGSVSLYEVERCQQLSATILTDHQYLERTPLCAILKQKAPQQYRIRAKLRSYKPRRLFQSVKLHCPKCHLLQEVPHEGDLDIIFQDGATKTPDVKLQNTSLYDSKIWTTKNQKGRKVAVHFVKNNGILPLSNECLLLIEGGTLSEICKLSNKFNSVIPVRSGHEDLELLDLSAPFLIQGTIHHYGCKQCSSLRSIQNLNSLVDKTSWIPSSVAEALGIVPLQYVFVMTFTLDDGTGVLEAYLMDSVSIRGQILPDSSIRSSDG

SEQ ID NO: 27207 - protein, 542 aa, Homo sapiens
LPGKFSLGTSGGYYRPYSRPYGLWNLTTGGRAGPDGDITCGVSPMDETEWIHRHPKAEDLRVGLISWAGTYLTFEACKNTVTATAKSLGRRQTWEILVSNEHETQAVVRLKSVQGLYLLCECDGTVCYGRPRTSHHGCFLLRFHRNSKWTLQCLISGRYLESNGKDVFCTSHVLSAYHMWTPRPALHVHVILYSPIHRCYARADPTMGRIWVDAAVPCLEECGFLLHFRDGCYHLETSTHHFLSHVDRLFSQPSSQTAFHMQVRPGGLVALCDGEGGMLYPQGTHLLLGMGCNPMRGEEWFILQHCPTWVSLRSKTGRFISVIYDGEVRAASERLNRMSLFQFECDSESPTVQLRSANGYYLSQRRHRAVMADGHPLESDTFFRMHWNCGRIILQSCRGRFLGIAPNSLLMANVILPGPNEEFGILFANRSFLVLRGRYGYVGSSSGHDLIQCNQDQPDRIHLLPCRPGIYHFQAQGGSFWSITSFGTFRPWGKFALNFCIELQGSNLLTVLAPNGFYMRADQSGTLLADSEDITRECIWEF

SEQ ID NO: 27208 - protein, 48 aa, Homo sapiens
LQGPTSGFPGSGFGPRRRGRKARAPAFPGLSLLGCLWSGQPGSREIQP

SEQ ID NO: 27209 - protein, 99 aa, Homo sapiens
LGGLNEFVVKFYGPQGTPYEGGVWKVRVDLPDKYPFKSPSIGFMNKIFHPNIDEASGTVCLDVINQTWTALYGEFGHGIFFGDVETLPKKMLFGFSFLV

SEQ ID NO: 27210 - protein, 178 aa, Homo sapiens
VGAAAARPAAGCRGAAAATQRGAQRRRERSPAGPPRTRRARAAARPGEHGRRGVTPLCPLGIKDIQPAGVGTKGGSPASPPQPPRAAAAARAPGLGGGKGCSESIPIFRPFCWTLRPPWTPQEKLSSPAGSDSAPSAFLGCSRLPCASVEYLRSGLGLEEAATRAHTHTFRGGREAAA

SEQ ID NO: 27211 - protein, 24 aa, Homo sapiens
MYSCRSGENEDIFLQTSYRSYMNV

SEQ ID NO: 27212 - protein, 124 aa, Homo sapiens [sequence omitted]

SEQ ID NO: 27213 - protein, 74 aa, Homo sapiens
MGKARMQSPTTTNYAVEFSTFGNITGVSTSGVQSMSPTLGKTTFVIMVSSLPERNQSASFSTSSMTPEDSLCIL

SEQ ID NO: 27214 - protein, 84 aa, Homo sapiens
VRGRMDQRRQVGKARMQSPTTTNYAVEFSTFGNITGVSTSGVQSMSPTLGKTTFVIMVSSLPERNQSASFSTSSMTPEDSLCIL

SEQ ID NO: 27215 - protein, 54 aa, Homo sapiens
MGKARMQSPTTTNYAVEFSTFGNITGVSTSGVQSMSPTLGKTTFVIMVSSLPAT

SEQ ID NO: 27216 - protein, 77 aa, Homo sapiens
VRGRMDQRRQVGKARMQSPTTTNYAVEFSTFGNITGVSTSGVQSMSPTLGKTTFVIMVSSLPGKYLNSHLLKEWINK

SEQ ID NO: 27217 - protein, 101 aa, Homo sapiens
LPEFINGDFDSIRPEVREYYATKGCELISTPDQDHTDFTKCLKMLQKKIEEKDLKVIYTCIWWLFQGCENNLCLFFHSAEMDIYFCAFSFFLNCCQVFFPL

SEQ ID NO: 27218 - protein, 93 aa, Homo sapiens
LKDLKLMPKAKNSKKTVGMCLEQQGSGCSWGSRIHSSVLLLMEDLPAAAASRPYCKGAGKGRGRAGSCPLEFTSPSLRKCVPGCPKPMEKQNH

SEQ ID NO: 27219 - protein, 18 aa, Homo sapiens
LVPSTVSGTQQVLCKCVE

SEQ ID NO: 27220 - protein, 379 aa, Homo sapiens
MLLPALLFGMAWALADGRWCEWTETIRVEEEVAPRQEDLVPCASLDHYSRLGWRLDLPWSGRSGLTRSPAPGLCPIYKPPETRPAKWNRTVRTCCPGWGGAHCTEALAKASPEGHCFAMWQCQLQAGSANASAGSLEECCARPWGQSWWDGSSQACRSCSSRHLPGSASSPALLQPLAGAVGQLWSQHQRPSATCASWSGFHYRTFDGRHYHFLGRCTYLLAGAADSTWAVHLTPGDRCPQPGHCQRVQVTMGPEEVLIQAGNVSVKGQLVPEGQSWLLHGLSLQWLGDWLVLSGGLGVVVRLDRTGSISISVDHELWGQTQGLCGLYNGWPEDDFMEPGGGLAMLAATFGNSWRLPGSESGCLDAVEVAQGCDSPWGS

SEQ ID NO: 27221 - protein, 377 aa, Homo sapiens
MLLPALLFGMAWALADGRWCEWTETIRVEEEVAPRQEDLVPCASLDHYSRLGWRLDLPWSGRSGLTRSPAPGLCPIYKPPETRPAKWNRTVRTCCPGWGGAHCTEALAKASPEGHCFAMWQCQLQAGSANASAGSLEECCARPWGQSWWDGSSQACRSCSSRHLPGSASSPALLQPLAGAVGQLWSQHQRPSATCASWSGFHYRTFDGRHYHFLGRCTYLLAGAADSTWAVHLTPGDRCPQPGHCQRVTMGPEEVLIQAGNVSVKGQLVPEGQSWLLHGLSLQWLGDWLVLSGGLGVVVRLDRTGSISISVDHELWGQTQGLCGLYNGWPEDDFMEPGGGLAMLAATFGNSWRLPGSESGCLDAVEVAQGCDSPWGS

SEQ ID NO: 27222 - protein, 4776 aa, Homo sapiens
LGLIDADVEPGHLRAEAQDVCHQLLEGPFGQCHAQVSPAEYHEACLFAYCAGAMAGSGQEGRQQAVCATFASYVQACARRHIHIRWRKPGFCERLCPGGQLYSDCVSLCPPSCEAVGQGEEESCREECVSGCECPRGLFWNGTLCVPAAHCPCYYCRQRYVPGDTVRQLCNPCVCRDGRWHCAQALCPAECAVGGDGHYLTFDGRSYSFWGGQGCRYSLVQDYVKGQLLILLEHGACDAGSCLHAISVSLEDTHIQLRDSGAVLVNGQDVGLPWIGAEGLSVRRASSAFLLLRWPGAQVLWGLSDPVAYITLDPRHAHQVQGLCGTFTQNQQDDFLTPAGDVETSIAAFASKFQVAGKGRCPSEDSALLSPCTTHSQRHAFAEAACAILHSSVFQECHRLVDKEPFYLRCLAAVCGCDPGSDCLCPVLSAYARRCAQEGASPPWRNQTLCPVMCPGGQEYRECAPACGQHCGKPEDCGELGSCVAGCNCPLGLLWDPEGQCVPPSLCPCQLGARRYAPGSATMKECNRCICQERGLWNCTARHCPSQAFCPRELVYAPGACLLTCDSPSANHSCPAGSTDGCVCPPGTVLLDERCVPPDLCPCRHSGQWYLPNATIQEDCNVCVCRGRQWHCTGQRRSGRCQASGAPHYVTFDGLAFTYPGACEYLLVREASGLFTVSAQNLPCGASGLTCTKALAVRLEGTVVHMLRGRAVTVNGVSVTPPKVYTGPGLSLRRAGLFLLLSTHLGLTLLWDGGTRVLVQLSPQFRGRVAGLCGDFDGDASNDLRSRQGVLEPTAELAAHSWRLSPLCPEPGDLPHPCTMNTHRAGWARARCGALLQPLFTLCHAEVPPQQHYEWCLYDACGCDSGGDCECLCSAIATYADECARHGHHVRWRSQELCSLQCEGGQVYEACGPTCPPTCHEQHPEPGWHCQVVACVEGCFCPEGTLLHGGACLEPASCPCEWGRNSFPPGSVLQKDCGNCTCQEGQWHCGGDGGHCEELVPACAEGEALCQENGHCVPHGWLCDNQDDCGDGSDEEGCAAPGCGEGQMTCSSGHCLPLALLCDRQDDCGDGTDEPSYPCPQGLLACADGRCLPPALLCDGHPDCLDAADEESCLGQVTCVPGEVSCVDGTCLGAIQLCDGVWDCPDGADEGPGHCPLPSLPTPPASTLPGPSPGSLDTASSPLASASPAPPCGPFEFRCGSGECTPRGWRCDQEEDCADGSDERGCGGPCAPHHAPCARGPHCVSPEQLCDGVRQCPDGSDEGPDACGGLPALGGPNRTGLPCPEYTCPNGTCIGFQLVCDGQPDCGRPGQVGPSPEEQGCGAWGPWSPWGPCSRTCGPWGQGRSRRCSPLGLLVLQNCPGPEHQSQACFTAACPVDGEWSTWSPWSVCSEPCRGTMTRQRQCHSPQNGGRTCAALPGGLHSTRQTKPCPQDGCPNATCSGELMFQPCAPCPLTCDDISGQVTCPPDWPCGSPGCWCPEGQVLGSEGWCVWPRQCPCLVDGARYWPGQRIKADCQLCICQDGRPRRCRLNPDCAVDCGWSSWSPWAKCLGPCGSQSIQWSFRSSNNPRPSGRGRQCRGIHRKARRCQTEPCEGCEHQGQVHRVGERWHGGPCRVCQCLHNLTAHCSPYCPLGSCPQGWVLVEGTGESCCHCALPGENQTVQPMATPAAAPAPSPQIRFPLATYILPPSGDPCYSPLGLAGLAEGSLHASSQQLEHPTQAALLGAPTQGPSPQGWHAGGDAYAKWHTRPHYLQLDLLQPRNLTGILVPETGSSNAYASSFSLQFSSNGLHWHDYRDLLPGILPLPKLFPRNWDDLDPAVWTFGRMVQARFVRVWPHDVHHSDVPLQVELLGCEPGSPPAPLCPGVGLRCASGECVLRGGPCDGVLDCEDGSDEEGCVLLPEGTGRFHSTAKTLALSSAQPGQLLHWPREGLAETEHWPPGQESPTSPTETRPVSPGPASGVPHHGESVQMVTTTPIPQMEARTLPPGMAAVTVVPPHPVTPATPAGQSVAPGPFPPVQCGPGQTPCEVLGCVEQAQVCDGREDCLDGSDERHCARNLLMWLPSLPALWAASTVPFMMPTMALPGLPASRALCSPSQLSCGSGECLSAERRCDLRPDCQDGSDEDGCVDCVLAPWSVWSSCSRSCGLGLTFQRQELLRPPLPGGSCPRDRFRSQSCFVQACPVAGAWAMWEAWGPCSVSCGGGHQSRQRSCVDPPPKNGGAPCPGASQERAPCGLQPCSGGTDCELGRVYVSADLCQKGLVPPCPPSCLDPKANRSCSGHCVEGCRCPPGLLLHDTRCLPLSECPCLVGEELKWPGVSFLLGNCSQCVCEKGELLCQPGGCPLPCGWSAWSSWAPCDRSCGSGVRARFRSPSNPPAAWGGAPCEGDRQELQGCHTVCGTEVFGWTPWTSWSSCSQSCLAPGGGPGWRSRSRLCPSPGDSSCPGDATQEEPCSPPVCPVPSIWGLWAPWSTCSAPCDGGIQTRGRSCSSLAPGDTTCPGPHSQTRDCNTQPCTAQCPENMLFRSAEQCHQEGGPCPRLCLTQGPGIECTGFCAPGCTCPPGLFLHNASCLPRSQCPCQLHGQLYASGAMARLDSCNNCTCVSGKMACTSERCPVACGWSPWTLWSLCSCSCNVGIRRRFRAGTAPPAAFGGAECQGPTMEAEFCSLRPCPGPGGEWGPWSPCSVPCGGGYRNRTRGSSRSLMEFSTCGLQPCAGPVPGMCPRDKQWLDCAQGPASCAELSAPRGTNQTCHPGCHCPSGMLLLNNVCVPTQDCPCAHEGHLYPPGSTVVRPCENCSCVSGLIANCSSWPCAEGEPTWSPWTPWSQCSASCGPARCHRHRFCARSPSAVPSTVAPLPLPATPTPLCSGPEAEEEPCLLQGCDRAGGWGPWGPWSHCSRSCGGGLRSRTRACDQPPPQGLGDYCEGPRAQGEVCQALPCPVTNCTAIEGAEYSPCGPPCPRSCDDLVHCVWRCQPGCYCPPGQVLSSNGAICVQPGHCSCLDLLTGQRHHPGARLARPDGCNHCTCLEGRLNCTDLPCPVPGGWCPWSEWTMCSQPCRGQTRSRSRACACPTPQHGGAPCTGEAGEAGAQHQREACPSYATCPVDGAWGPWGPWSPCDMCLGQSHRSRACSRPPTPEGGRPCPGNHTQSRPCQENSTQCTDCGGGQSLHPCGQPCPRSCQDLSPGSVCQPGSVGCQPTCGCPLGQLSQDGLCVPPAHCRCQYQPGAMGIPENQSRSAGSRFSSWESLEPGEVVTGPCDNCTCVAGILQCQEVPDCPDPGVWSSWGPWEDCSVSCGGGEQLRSRRCARPPCPGPARQSRTCSTQVCREAGCPAGRLYRECQPGEGCPFSCAHVTQQVGCFSEGCEEGCHCPEGTFQHRLACVQECPCVLTAWLLQELGATIGDPGQPLGPGDELDSGQTLRTSCGNCSCAHGKLSCSLDDCFEADGGFGPWSPWGPCSRSCGGLGTRTRSRQCVLTMPTLSGQGCRGPRQDLEYCPSPDCPGAEGSTVEPVTGLPGGWGPWSSWSPCSRSCTDPARPAWRSRTRLCLANCTMGDPLQERPCNLPSCTELPVCPGPGCGAGNCSWTSWAPWEPCSRSCGVGQQRRLRAYRPPGPGGHWCPNILTAYQERRFCNLRACPVPGGWSRWSPWSWCDRSCGGGQSLRSRSCSSPPSKNGGAPCAGERHQARLCNPMPCEAGCPAGMEVVTCANRCPRRCSDLQEGIVCQDDQVCQKGCRCPKGSLEQDGGCVPIGHCDCTDAQGHSWAPGSQHQDACNNCSCQAGQLSCTAQPCPPPTHCAWSHWSAWSPCSHSCGPRGQQSRFRSSTSGSWAPECREEQSQSQPCPQPSCPPLCLQGTRSRTLGDSWLQGECQRCSCTPEGVICEDTECAVPEAWTLWSSWSDCPVSCGGGNQVRTRACRAAAPHHRSPPCLGPDTQTRQQPCPGLLEACSWGPWGPCSRSCGPGLASRSGSCPCLMAKADPTCNSTFLHLDTQGCYSGPCPEECVWSSWSSWTRCSCRVLVQQRYRHQGPASRGARAGAPCTRLDGHFRPCLISNCSEDSCTPPFEFHACGSPCAGLCATHLSHQLCQDLPPCQPGCYCPKGLLEQAGGCIPPEECNCWHTSAAGAGMTLAPGDRLQLGCKECECRRGELHCTSQGCQGLLPLSEWSEWSPCGPCLPPSALAPASRTALEEHWLRDPTGLSPTLAPLLASEQHRHRLCLDPATGRPWTGAPHLCTAPLSQQRLCPDPGACPDSCQWSLWGPWSPCQVPCSGGFRLRWREAEALCGGGCREPWAQESCNGGPCPESCEAQDTVFTLDCANQCPHSCADLWDRVQCLQGPCRPGCRCPPGQLVQDGRCVPISSCRCGLPSANASWELAPAQAVQLDCQNCTCVNESLVCPHQECPVLGPWSAWSSCSAPCGGGTMERHRTCEGGPGVAPCQAQDTEQRQECNLQPCPECPPGQVLSACATSCPCLCWHLQPGAICVQEPCQPGCGCPGGQLLHNGTCVPPTACPCTQHSLPWGLTLTLEEQAQELPPGTVLTRNCTRCVCHGGAFSCSLVDCQVPPGETWQQVAPGELGLCEQTCLEMNATKTQSNCSSARASGCVCQPGHFRSQAGPCVPEDHCECWHLGRPHLPGSEWQEACESCLCLSGRPVCTQHCSPLTCAQGEEMVLEPGSCCPSCRREAPEEQSPSCQLLTELRNFTKGTCYLDQVEVSYCSGYCPSSTHVMPEEPYLQSQCDCCSYRLDPESPVRILNLRCLGGHTEPVVLPVIHSCQCSSCQGGDFSKR

SEQ ID NO: 27223 - protein, 309 aa, Homo sapiens
MTSLARSRAHLIGPAAARAAGAQKGRCWAARGGVCGPGSAPAWWTVPATGLGNASRPTASSASAKTDGPDAADSTRTALWTVAGPPGHPGPSAWAPVEARASSGPSGAPTTPAPPAEVASAVASTARHAGARRSPVRGVSIRARSTVSGNAGMGAPAGCASVCTTSPHTAHPTARSAAAPRAGSWWRGRENHAATVPYLERTRRSSPWPLLPQLRLPVPRSDSLWPLTFCLRQETPAILPWGWPDWLRGVCMHRPSSWNTPPRLPSWGLPPRGPALRDGTLEGMLMPSGTLGPITCSWTCFSLGTSLAS

SEQ ID NO: 27224 - protein, 128 aa, Homo sapiens
LEERRRDPHPGMTLQEGDCRGSQTVSLTMGTADSDEMAPEAPQHTHIDVHIHQESALAKLLLTCCSALRPRATQARGSSRLLVASWVSVTACLVGRREELPTSSRSSTLCQPPSEQDTEPVMSSYLAM

SEQ ID NO: 27225 - protein, 93 aa, Homo sapiens
LVGSVLSLSQVRLLLHGHLSISSGYLLPGRSCCSYSSPIRPTLGEYPSFFLLSVPPWPRVMRTPRESFLLQGKASPGHQVTQVYFPRGSPNRH

SEQ ID NO: 27226 - protein, 167 aa, Homo sapiens
LAGGDTNGEWILRGSTWGLCPPSPGCGAGRRALATPGPLESPAAAQDPLPRHVGPSGLGWSLEPAARVLSGLLVGAGVGPRLPCGARWFHAPERPRCADLAALRGDGSALKTVVFPKPSLLSGLQGAAGEGFVPVAKALQVEPYLLWEGPAFSDSRRALCRLLAEKR

SEQ ID NO: 27227 - protein, 43 aa, Homo sapiens
MGRPRIFRFTQGPLQTVGRKKVATKHMHKLDFSQNAAAELPSR

SEQ ID NO: 27228 - protein, 38 aa, Homo sapiens
MARLRALPACFTRAQPPASTENVFWNQHSLQRLHTAFW

SEQ ID NO: 27229 - protein, 54 aa, Homo sapiens
LPGPRWLLQARPGPVGPQRGDISLLGEKEIRATRRGLRAFPSRERRSGRPARTA

SEQ ID NO: 27230 - protein, 133 aa, Homo sapiens
LVIWYCRETPSQPALQRGIASHSGCRERHLVTQAAETTAVNCSSSHCWMLADAVLAPAGDPFTKTFWADLKWLGFRSSASRTHPSSLERRGQRRGGGAACEIPPFTHTTTKRGHTEVKSDRVPGKAVRLETPE

SEQ ID NO: 27231 - protein, 49 aa, Homo sapiens
LAYLTREGHKHQPDLGTPKFREVKAGEGHLLFPTQACHRGLRDSTGDAG

SEQ ID NO: 27232 - protein, 392 aa, Homo sapiens
LLSLAQAGDQGRRDKSLLLHSLCPPGSASAPWVPPRGRRWVRFLVTNQPRLMLASTPCPGDHIPHVPCQDCGPSGRLSSLLEVSDFPRASSSRSCASSQPVRAACPCLLLPLPLLPYHFFSSPSLSFSPACVLLSSISADPWTQLCGARTRRGRGTGSPCVSDAHVAALLFWASRRGVYSAEEQHSHLSTPSKKQLLPQQPTGAVRGTQCGLGLGVEAPRLSFTMCLFPQIAEGMAYIERMNSIHRDLRAANILVSEALCCKIADFGLARIIDSEYTAQEGAKFPIKWTAPEAIHFGVFTIKADVWSFGVLLMEVVTYGRVPYPGMSNPEVIRNLERGYRMPRPDTCPPELYRGVIAECWRSRPEERPTFEFLQSVLEDFYTATERQYELQP

SEQ ID NO: 27233 - protein, 86 aa, Homo sapiens
LQAVDSGLIVLRETSKHLEHKDNELRQKKKELLERKTKKKPEQKISSKLGSLKLMEQDTCNLEEEERKASSKIKEINVQKAKLVTE

SEQ ID NO: 27234 - protein, 284 aa, Homo sapiens
LIFYFFFFEMESYSVTQAGVQWHELCSLQPSPPRFREMCIEQDGRVHLTVVYFGKEEINEVKGILENTSKAANFRNFTFIQLNGEFSRGKGLDVGARFWKGSNVLLFFCDVDIYFTSEFLNTCRLNTQPGKKVFYPVLFSQYNPGIIYGHHDAVPPLEQQLVIKKETGFWRDFGFGMTCQYRSDFINIGGFDLDIKGWGGEDVHLYRKYLHSNLIVVRTPVRGLFHLWHEKRCMDELTPEQYKMCMQSKAMNEASHGQLGMLVFRHEIEAHLRKQKQKTSSKKT

SEQ ID NO: 27235 - protein, 149 aa, Homo sapiens
LQPPAPLTLVGTGPSSASGREVTPPLQLALTSARKPRASKPFAPALRLPQKPGLRVEMPPTHDPGPPPASRPRNGNSSTKPGTGQKLGLPPPLDGVKRPGLAHFGVSWLPALTYTHAPPHTLCSLKNVIYWGPPSCFPHLPLPYLTPPA

SEQ ID NO: 27236 - protein, 442 aa, Homo sapiens
VRPARPPGPLVTQEPHLGRNGMGASVPTNPPPPLCHSGPPPSGRTELVLSSPHCARPRTGDPSPCPTPSHFDGVCDISCCEVKEGPLRPAPFSCSLLVHVSIFPLVHLSSKQVMVTHAGPLGPPSSSPHSWALLSWSCWMQCPFGPPCRLASHSRPPGLASSASCCSVPVGESPARPPLPLGHPNLSPAQTQRLPLFAPLQTRTSAPRITAAASRTASTRSAVMSANAAVASSSMTTSTTAKKTFMEMDIESQPECAYDHLEVFDGRDAKAPVLGRFCGSKKPEPVLATGSRMFLRFYSDNSVQRKGFQASHATECGGQVRADVKTKDLYSHAQFGDNNYPGGVDCEWVIVAEEGYGVELVFQTFEVEEETDCGYDYMELFDGYDSTAPRLGRYCGSGPPEEVYSAGDSVLVKFHSDDTITKKGFHLRYTSTKFQDTLHSRK

SEQ ID NO: 27237 - protein, 139 aa, Homo sapiens
LVASPRLCWETRRWRLLRPERRARERGSRRVARSRFRVWSARELPSHQPVEETTGRASGERAHTVSSPAPASSIFPGLAWRVLADVFERRNVIGALSSPSPRQLLWGWRGIVRGALSCWEAWVLFPTTLKEDSVPNVPV

SEQ ID NO: 27238 - protein, 87 aa, Homo sapiens
LGLSSPLLRMAQALLGSGHRLLGEGSPLAITGMESMLERAQCWAGFASRTLRSSHPGLARRNQHLFPVAPVFRMWYWLWPSLLPCYP

SEQ ID NO: 27239 - protein, 96 aa, Homo sapiens
VFLPVTQPPRLRPACSRIKNSELCVQCTPRHTHAHTRARTHMLFSVPLRFLKPGEKSVTEVFWFYCYVGFLLYFFLFVLFLNIQKQLMIRHRRNPE

SEQ ID NO: 27240 - protein, 330 aa, Homo sapiens
LQQQQQQRRWQQQQQRRQQQQQRRHRWQQQHHQQQQQKKILIKSSPKLSVYPDPHLHSSQERERGKGGRKKKKPNNLAETSQRMLQNSAVLLVLVISASATHEAEQNDSVSPRKSRVAAQNSAEVVRCLNSALQVGCGAFACLENSTCDTDGMYDICKSFLYSAAKFDTQGKAFVKESLKCIANGVTSKVFLAIRRCSTFQRMIAEVQEECYSKLNVCSIAKRNPEAITEVVQLPNHFSNRYYNRLVRSLLECDEDTVSTIRDSLMEKIGPNMASLFHILQTDHCAQTHPRADFNRRRTNEPQKLKVLLRNLRGEEDSPSHIKRTSHESA

SEQ ID NO: 27241 - protein, 56 aa, Homo sapiens
LQKPEVQEAATAAAAAAAAVAAAAAAAAAAAAAEAPVAAAASPATTTKKNPHQILT

SEQ ID NO: 27242 - protein, 69 aa, Homo sapiens
VGATCLRLPPLPAMYLPCLAVGHVGLPGGRPRGVTFPCHFARRPLPTPTPGCTAQAAAGQRGLWAMDTG

SEQ ID NO: 27243 - protein, 48 aa, Homo sapiens
LEGRAASQTSTNNGMRLDIWNHNHNRPERPTSLMTSFFFQRKVSVWGT

SEQ ID NO: 27244 - protein, 43 aa, Homo sapiens
LEGRAASQTSTNNGMRLDIWNHNHNRPERPTSLMTSFFFQRKF

SEQ ID NO: 27245 - protein, 541 aa, Homo sapiens
LPDDGSVSRTVITSPRSGCEGAGQRPGREPPAVGPIDDFPGRQEQPREPGRAPVPGGRTARRVRAALPAGNGRRPRAARAPQRGRSLSPSRDKLFPNPIRALGPNSPAPRAVRVERSVSGEMSERKEGRGKGKGKKKERGSGKKPESAAGSQSPALPPRLKEMKSQESAAGSKLVLRCETSSEYSSLRFKWFKNGNELNRKNKPQNIKIQKKPGKSELRINKASLADSGEYMCKVISKLGNDSASANITIVESNEIITGMPASTEGAYVSSESPIRISVSTEGANTSSSTSTSTTGTSHLVKCAEKEKTFCVNGGECFMVKDLSNPSRYLCKCPNEFTGDRCQNYVMASFYKAEELYQKRVLTITGICIALLVVGIMCVVAYCKTKKQRKKLHDRLRQSLRSERNNMMNIANGPHHPNPPPENVQLVNQYVSKNVISSEHIVEREAETSFSTSHYTSTAHHSTTVTQTPSHSWSNGHTESILSESHSVIVMSSVENSRHSSPTGGPRGRLNGTGGPRECNSFLRHARETPDSYRDSPHSER

SEQ ID NO: 27246 - protein, 758 aa, Homo sapiens
LPDDGSVSRTVITSPRSGCEGAGQRPGREPPAVGPIDDFPGRQEQPREPGRAPVPGGRTARRVRAALPAGNGRRPRAARAPQRGRSLSPSRDKLFPNPIRALGPNSPAPRAVRVERSVSGEMSERKEGRGKGKGKKKERGSGKKPESAAGSQSPALPPRLKEMKSQESAAGSKLVLRCETSSEYSSLRFKWFKNGNELNRKNKPQNIKIQKKPGKSELRINKASLADSGEYMCKVISKLGNDSASANITIVESNEIITGMPASTEGAYVSSESPIRISVSTEGANTSSSTSTSTTGTSHLVKCAEKEKTFCVNGGECFMVKDLSNPSRYLCKCPNEFTGDRCQNYVMASFYKAEELYQKRVLTITGICIALLVVGIMCVVAYCKTKKQRKKLHDRLRQSLRSERNNMMNIANGPHHPNPPPENVQLVNQYVSKNVISSEHIVEREAETSFSTSHYTSTAHHSTTVTQTPSHSWSNGHTESILSESHSVIVMSSVENSRHSSPTGGPRGRLNGTGGPRECNSFLRHARETPDSYRDSPHSERYVSAMTTPARMSPVDFHTPSSPKSPPSEMSPPVSSMTVSMPSMAVSPFMEEERPLLLVTPPRLREKKFDHHPQQFSSFHHNPAHDSNSLPASPLRIVEDEEYETTQEYEPAQEPVKKLANSRRAKRTKPNGHIANRLEVDSNTSSQSSNSESETEDERVGEDTPFLGIQNPLAASLEATPAFRLADSRTNPAGRFSTQEEIQARLSSVIANQDPIAV

SEQ ID NO: 27247 - protein, 56 aa, Homo sapiens
LSDSRICVLNPIHKEAIMSQPLFLRFTDVRVQFTRMPSYTGLWNQKLQLVIKCDAI

SEQ ID NO: 27248 - protein, 86 aa, Homo sapiens
LLFTGGAAWRPVTRTQRPYVSSSESCCVTSLFPVGARVWLFFGLFLTSDILIQVIAFLSPLSLIFLAKFLKKADTRDSRQACLGER

SEQ ID NO: 27249 - protein, 55 aa, Homo sapiens
LKLGGGGCSEPRLRHCTPAWATEKTKRKTNDEGLQKLKPRHVSAPSMWAWFCQCF

SEQ ID NO: 27250 - protein, 368 aa, Homo sapiens
MTPCWRCLTCRCGLRASRLLWSLLRTPLWSVARLRTLMPQVTSGSWRGHSQRNRGAPSWALWNLWRTTQWIQMPQMALSICLNRRKVRGHQRGQARITHSPTVSQVTERSQDRLQDWDADGSIVSYLQDAAQGSWQEEVTQGPHSFQGTSTMTEGLEPGGSQEYEKVLVSVSEHTWTEQPEAESSQADRDRRQQGQEEQVQEAKNTFTQVVQGNEFQNIPGEQVTEEQFTDEQGNIVTKKIIRKVVRQIDLSSADAAQEHEEVTVEGPLEDPSELEVDIDYFMKHSKVLRRPRPWGTQRHHCCLALPGRLHDTSLHSPLYELSLQSLFSLVGSVSATSVWPPFDLLPVFCPSLRSVLLSVSAAVCRWS

SEQ ID NO: 27251 - protein, 169 aa, Homo sapiens
LRTRRGEVRGRVQSSGRASFPAPRLRAEGTLLPWQRTCARWRGPAPLRSSPRNARAPSARPLPACAPRPPSPPALGRGLRRDRLPRPLPLPRTPGCLAVSPSCCLLQAALGTAGLCVLTTRAGSRNGHILATGTREMQPSEGLGVSVPQGNFFFFLEVEGAGFSLCCPG

SEQ ID NO: 27252 - protein, 164 aa, Homo sapiens
LEKPMSLSSPLVDPSFWRCLLVWAQLESETYLPLLGRMPLASSSNVVGRKTGKGNFGGQNEQEDTLNQLLVEMDGFNTTTNVVILASTNQPDILDPALLRPGRFDRQIFIGLPDIKGRGSIFKVHLRPLKLDSTLEKEKLARKLASLTPGFSGADVANVCNEAA

SEQ ID NO: 27253 - protein, 291 aa, Homo sapiens [sequence omitted]

SEQ ID NO: 27254 - protein, 217 aa, Homo sapiens
MSSKVSCDTLYKAVREVLHGNQCKRHKFLETMELHISLKNYDPQKDKRFSGTVRLKSTPHPKFSVCVLGDQQHCDEAKAIDIPHMDIKTLKNLNKNKKLVKKLVKKYDAFLASESLIKQIPRILSPGLNKAGKFPSLLTQNENMVAKVDEVKSTIKFQMKKVLCLAVAVGHVKMTDDELVYNTHLAVNFLGSLLKKNWQNVRALYIKSTMGKPQRLY

SEQ ID NO: 27255 - protein, 75 aa, Homo sapiens [sequence omitted]

SEQ ID NO: 27256 - protein, 198 aa, Homo sapiens
VYYCANGTVRGVEFDFIPDVKGAVLVCDMFSNFLSKPVDVSKFDVIFSGAQKNVGSAGVTVVIVRDDQLGFALRESPSVLECKVQAGNSSSYNTPPCFSIYIMGLLLEWTKNNGGAAAMEKLSSIKSQMIYEITDNSQGFYVCPVETQNRSKMNIPFCIGNVKGDDALVKRFLDKAFETQYVVLERAQVCGKHPGLSV

SEQ ID NO: 27257 - protein, 106 aa, Homo sapiens
LPVQRVADVSREESTDLLCCCPHRHQLRAPLLCCLTFWEQETTRAKDATEWEEEEDEGGLTHLSPTEPAHLPRCLPQRRWYLCRDLTMRRCSGTASASSMPSTWRA

SEQ ID NO: 27258 - protein, 43 aa, Homo sapiens
LYFPSFTYRFHLEDSPFSLFFHRLAKMGRIGFHSLPRRVNGTG

SEQ ID NO: 27259 - protein, 20 aa, Homo sapiens
MFLFQFYCSWDDYVLWKMFK

SEQ ID NO: 27260 - protein, 58 aa, Homo sapiens [sequence omitted]

SEQ ID NO: 27261 - protein, 44 aa, Homo sapiens
MFLQKLKSCLVKAFHKMVCVWDQEDRRLLKKRTGTLTHFRLLHV

SEQ ID NO: 27262 - protein, 54 aa, Homo sapiens
LESASPFLRSVSGRRKSPNMFSRFASPTRKLATCRVLEVETIWGLLAAVQQIYL

SEQ ID NO: 27263 - protein, 34 aa, Homo sapiens
MLIANCSVQLSHSCLFPCISEHQANTSRETWKKK

SEQ ID NO: 27264 - protein, 81 aa, Homo sapiens
LQGELGAEPPQPCHPARVSAMLPWIPIYPVLGDRTSWASYQSTGHLLCGLPFNLTTDLFLMCTFWKQDIVPQRNEKNVGNT

SEQ ID NO: 27265 - protein, 26 aa, Homo sapiens
MFLAVMFKNTSASLPQVWHAAFWKEN

SEQ ID NO: 27266 - protein, 8 aa, Homo sapiens
MNVLSCHV

SEQ ID NO: 27267 - protein, 8 aa, Homo sapiens
LFLAYRLL

SEQ ID NO: 27268 - protein, 23 aa, Homo sapiens
MPVWWRRRRLRARSWALRAYRLL

SEQ ID NO: 27269 - protein, 19 aa, Homo sapiens
VKVYESHHNRCFPKTCRRL

SEQ ID NO: 27270 - protein, 49 aa, Homo sapiens
LSSDVALPFPRDRRGRKKREEPLVMPVWWRRRRLRARSWALRGARKPLR

SEQ ID NO: 27271 - protein, 27 aa, Homo sapiens
LQSGFYNTMRKTEVIRRENQQQIITCS

SEQ ID NO: 27272 - protein, 379 aa, Homo sapiens
MVSTNFTSGSRCHGCPKSLETTTSPLPRRWRRPGAVWPRKPGNWPTTCRKLRVSMKSTNTTRNSSKKSWRRSPGLRIKGEAKISIHVLTSNMSHHYFKYCKISALALLKMVMHARSGGNLEVMGLMLGKVDGETMIIMDSFALPVEGTETRVNAQAAAYEYMAAYIENAKQVGRLENAIGWYHSHPGYGCWLSGIDVSTQMLNQQFQEPFVAVVIDPTRTISAGKVNLGAFRTYPKGYKPPDEGPSEYQTIPLNKIEDFGVHCKQYYALEVSYFKSSLDRKLLELLWNKYWVNTLSSSSLLTNADYTTGQVFDLSEKLEQSEAQLGRGSFMLGLETHDRKSEDKLAKATRDSCKTTIEAIHGLMSQVIKDKLFNQINIS

SEQ ID NO: 27273 - protein, 66 aa, Homo sapiens
MGRSFRWILLDPSPFPGTVIVTGGGCGCHCTAPTATAAPDLGDHVLPLQKELPFVTRRGRRSTLGP

SEQ ID NO: 27274 - protein, 127 aa, Homo sapiens
VSRSRGLVQLGRPQPLVTRVMLFLALGSPWAVELPLCGRRTALCAAAALRGPRASVSRASSSSGPSGPVAGWSTGPSGAARLLRRPGRAQIPVYWEGYVRFLNTPSDKSEDGRLIYTGNMARAVFGK

SEQ ID NO: 27275 - protein, 131 aa, Homo sapiens
VSRSRGLVQLGRPQPLVTRVMLFLALGSPWAVELPLCGRRTALCAAAALRGPRASVSRASSSSGPSGPVAGWSTGPSGAARLLRRPGRAQIPVYWEGYVRFLNTPSDKSEDGRLIYTGNMARAVFGWSAVA

SEQ ID NO: 27276 - protein, 280 aa, Homo sapiens
VSRSRGLVQLGRPQPLVTRVMLFLALGSPWAVELPLCGRRTALCAAAALRGPRASVSRASSSSGPSGPVAGWSTGPSGAARLLRRPGRAQIPVYWEGYVRFLNTPSDKSEDGRLIYTGNMARAVFGVKCFSYSTSLIGLTFLPYIFTQNNAISESVPLPIQIIFYGIMGSFTVITPVLLHFITKGYVIRLYHEATTDTYKAITYNAMLAETSTVFHQNDVKIPDAKHVFTTFYAKTKSLLVNPVLFPNREDYIHLMGYDKEEFILYMEETSEEKRHKDDK

SEQ ID NO: 27277 - protein, 69 aa, Homo sapiens
LKTRWDPDSSKAMEACILVNIELIHNFAPLLLIMGLILPVFTFPLNSGIRKNFQSLQMDTFAASILNIS

SEQ ID NO: 27278 - protein, 67 aa, Homo sapiens
LLTDALSSSLGEVMFSWMVLVFVDVHQCQGIEKLECDFEERRKDVKSDWSATFMVLRKEFAFLEHSL

SEQ ID NO: 27279 - protein, 63 aa, Homo sapiens
MEMQKSPVFCVAHAGSCRPELFLFGHLGSSECDFEERRKDVKSDWSATFMVLRKEFAFLEHSL

SEQ ID NO: 27280 - protein, 59 aa, Homo sapiens
LPPCSLISDCCASNQRDSVGVGPSEPECDFEERRKDVKSDWSATFMVLRKEFAFLEHSL

SEQ ID NO: 27281 - protein, 1049 aa, Homo sapiens
METCDSPPISRQENGQSTSKLCGTTQLDNEVPEKVAGMEPDRENSSTDDNLKTDERKSEALLGFSVENAAATQVTSAKEIPCNECATSFPSLQKYMEHHCPNARLPVLKDDNESEISELEDSDVENLTGEIVYQPDGSAYIIEDSKESGQNAQTGANSKLFSTAMFLDSLASAGEKSDQSASAPMSFYPQIINTFHIASSLGKPFTADQAFPNTSALAGVGPVLHSFRVYDLRHKREKDYLTSDGSAKNSCVSKDVPNNVDLSKFDGCVSDGKRKPVLMCFLCKLSFGYIRSFVTHAVHDHRMTLNDEEQKLLSNKCVSAIIQGIGKDKEPLISFLEPKKSTSVYPHFSTTNLIGPDPTFRGLWSAFHVENGDSLPAGFAFLKGSASTSSSAEQPLGITQMPKAEVNLGGLSSLVVNTPITSVSLSHSSSESSKMSESKDQENNCERPKESNVLHPNGECPVKSEPTEPGDEDEEDAYSNELDDEEVLGELTDSIGNKDFPLLNQSISPLSSSVLKFIEKGTSSSSATVSDDTEKKKQTAAVRASGSVASNYGISGKDFADASASKDSATAAHPSEIARGDEDSSATPHQHGFTPSTPGTPGPGGDGSPGSGIECPKCDTVLGSSRSLGGHMTMMHSRNSCKTLKCPKCNWHYKYQQTLEAHMKEKHPEPGGSCVYCKTGQPHPRLARGESYTCGYKPFRCEVCNYSTTTKGNLSIHMQSDKHLNNVQNLQNGNGEQVFGHSAPAPNTSLSGCGTPSPSKPKQKPTWRCEVCDYETNVARNLRIHMTSEKHMHNMMLLQQNMKQIQHNLHLGLAPAEAELYQYYLAQNIGLTGMKLENPADPQLMINPFQLDPATAAALAPGLGELSPYISDPALKLFQCAVCNKFTSDSLEALSVHVSSERSLPEEEWRAVIGDIYQCKLCNYNTQLKANFQLHCKTDKHMQKYQLVAHIKEGGKSNEWRLKCIAIGNPVHLKCNACDYYTNSVDKLRLHTTNHRHEAALKLYKVSSDIHFRWHRVEKGINSFRAWSTSLQLKEKKREKTSKGRGHSF

SEQ ID NO: 27282 - protein, 60 aa, Homo sapiens
LNIRRADSRHATLRAVTLTARVHGFILEVSETKNPPIPDTISWLSVASMEVLQSTSRRTA

SEQ ID NO: 27283 - protein, 42 aa, Homo sapiens
LEPKTHKSLSEKPDLLCRVSGLEMLKKIFSLQTKDLRVFGEL

SEQ ID NO: 27284 - protein, 97 aa, Homo sapiens
VISIYDAKTEQLRIGLYSWTPFPHVDFCLQQDDKQILENLSTSCLAEPPHFVEHIRSTLMFLKKNTAPTNTLFPGNKALLYKKNEDGLWEKISSPGS

SEQ ID NO: 27285 - protein, 69 aa, Homo sapiens [sequence omitted]

SEQ ID NO: 27286 - protein, 476 aa, Homo sapiens
LEKKMKFLIFAFFGGVHLLSLCSGKAICKNGISKRTFEEIKEEIASCGDVAKAIINLAVYGKAQNRSYERLALLVDTVGPRLSGSKNLEKAIQIMYQNLQQDGLEKVHLEPVRIPHWERGEESAVMLEPRIHKIAILGLGSSIGTPPEGITAEVLVVTSFDELQRRASEARGKIVVYNQPYINYSRTVQYRTQGAVEAAKVGALASLIRSVASFSIYSPHTGIQEYQDGVPKIPTACITVEDAEMMSRMASHGIKIVIQLKMGAKTYPDTDSFNTVAEITGSKYPEQVVLVSGHLDSWDVGQGAMDDGGGAFISWEALSLIKDLGLRPKRTLRLVLWTAEEQGGVGAFQYYQLHKVNISNYSLVMESDAGTFLPTGLQFTGSEKARAIMEEVMSLLQPLNITQVLSHGEGTDINFWIQAGVPGASLLDDLYKYFFFHHSHGDTMTVMDPKQMNVAAAVWAVVSYVVADMEEMLPRS

SEQ ID NO: 27287 - protein, 101 aa, Homo sapiens
LSPGERGEGSARDRVMQVQTGRSLPALQPPAAPRQAKGGRAGVGREREAARLERAVRPTPAASRAPALTLRGPAHCEPGRAPRWQRLRAVLGRRWREPCAA

SEQ ID NO: 27288 - protein, 60 aa, Homo sapiens
LPLIGYRELFFSPLSLSFPPSCCMQENYSPLLARPGCEIFSPALSRALCNPKMKDRRGES

SEQ ID NO: 27289 - protein, 56 aa, Homo sapiens
LFLSPVAFFSPALPGARHHRPTPHAPPPWGILSAPALKALTLELSAHPPTAPAQAS

SEQ ID NO: 27290 - protein, 181 aa, Homo sapiens
VLIIHPNPASGFPPTSTPAPTGPSPRSSAGRSRRRPQISHRAVSPAAAEERSAGVRGATSELALGTPQLPKRSARSPRTPCLRAAGGLARRGEEGCAPSSRSYLRVPPPASGTPGPIFLPPITENLFFVLKKKKKKKKACGRLSRTQEAQNWEKSLWLGLFQVSGSMGCSKPGLGNSFQTS

SEQ ID NO: 27291 - protein, 162 aa, Homo sapiens
VSPAAAEERSAGVRGATSELALGTPQLPKRSARSPRTPCLRAAGGLARRGEEGCAPSSRSYLRVPPPASGTPGPIFLPPITENLFFVLKKKKKKKKACGRLSRTQEAQNWEKSLWLGLFQVSGSMGCSKPGLGSSEGWTSLELDRTLKTGFLVLITYMGYNE

SEQ ID NO: 27292 - protein, 13 aa, Homo sapiens
MNKSKQKSRINWK

SEQ ID NO: 27293 - protein, 24 aa, Homo sapiens
VRSLCRDHQHGPSLLKSKPSKLTY

SEQ ID NO: 27294 - protein, 26 aa, Homo sapiens
LQVSCKYLTQLLLGFPRNITWEHIAI

SEQ ID NO: 27295 - protein, 20 aa, Homo sapiens
VYTTFRASCIWKAGRAQTLE

SEQ ID NO: 27296 - protein, 60 aa, Homo sapiens
LHASDVSSGEDTGKDSKEQENTLASLIAFKVLSKLTVMAPSRQTAMPHVQDGRITISFNS

SEQ ID NO: 27297 - protein, 11 aa, Homo sapiens
LARTAKNRRTL

SEQ ID NO: 27298 - protein, 11 aa, Homo sapiens
LVPPAYCMLLM

SEQ ID NO: 27299 - protein, 61 aa, Homo sapiens
LGHKSTTTTTTKNKAHTETEVLFGIEKMAMQVPTSKCKLPSFTSASVPSPLLNPTGRQEGA

SEQ ID NO: 27300 - protein, 39 aa, Homo sapiens
MITRESPNLLPFSTLNHQSVSNPKHTQTSLANTVKLHPY

SEQ ID NO: 27301 - protein, 69 aa, Homo sapiens [sequence omitted]

SEQ ID NO: 27302 - protein, 16 aa, Homo sapiens
LDECLTSRPGTTLSQQ

SEQ ID NO: 27303 - protein, 41 aa, Homo sapiens
LGSSQGPYFSAEPSHSLYRVGQHWLSSTSKCRRCGSCWPFN

SEQ ID NO: 27304 - protein, 19 aa, Homo sapiens
LAAEGPKKEELLEEKVVQR

SEQ ID NO: 27305 - protein, 59 aa, Homo sapiens
MGPRAGRARGGRDEEGRRRAASKDVPRDPRHLPVDFLAERMLAVPVTCGDTARSALQIY

SEQ ID NO: 27306 - protein, 84 aa, Homo sapiens
MGPRAGRARGGRDEEGRRRAASKDVPRDPRHLPVDFLAERMLAVPVTCGDTARSALQTIAVCSAGSQLLRGNKSVLRSPAVTVD

SEQ ID NO: 27307 - protein, 149 aa, Homo sapiens
MGPRAGRARGGRDEEGRRRAASKDVPRDPRHLPVDFLAERMLAVPVTCGDTARSALQPDLLARRRLKRCPSRWLCLSAAWSFVQVFSEPDGFTVIFSGLGNNAGGTMHWNDTRPAHFRILKVVLREAVAECLMDSYSLDVHGGRRTAAG

SEQ ID NO: 27308 - protein, 37 aa, Homo sapiens
VDFLAERMLAVPVTCGDTARSALQWEVSDDPEVRTHL

SEQ ID NO: 27309 - protein, 41 aa, Homo sapiens
LWRHGQICPPDLLGEKPSRKLQKDKYRIRVWEKPRGLVSII

SEQ ID NO: 27310 - protein, 12 aa, Homo sapiens
LPSSLIFWPEGD

SEQ ID NO: 27311 - protein, 51 aa, Homo sapiens
LISQEGGCINPQNPEWNFLQDLLGEKPSRKLQKDKYRIRVWEKPRGLVSII

SEQ ID NO: 27312 - protein, 9 aa, Homo sapiens
LSGTFYRIY

SEQ ID NO: 27313 - protein, 16 aa, Homo sapiens
VKHLMHVPSGAQLGLS

SEQ ID NO: 27314 - protein, 23 aa, Homo sapiens
LPYPTPHAVAESQPAMEASLDSH

SEQ ID NO: 27315 - protein, 26 aa, Homo sapiens
LFVDMVPDGHQATYSFKAPSFFANKK

SEQ ID NO: 27316 - protein, 35 aa, Homo sapiens
LNHLPFELLGTWLPWCSPFTARTLRFGENPVTPGI

SEQ ID NO: 27317 - protein, 22 aa, Homo sapiens
VAPLVFPFYCQDTEIWRGKWLT

SEQ ID NO: 27318 - protein, 50 aa, Homo sapiens
LSLRDLKLEYFEIGELRASLGALCSPGSSEELHLPCPCHRSCPVCFSCCC

SEQ ID NO: 27319 - protein, 58 aa, Homo sapiens [sequence omitted]

SEQ ID NO: 27320 - protein, 7 aa, Homo sapiens
LDLSQDM

SEQ ID NO: 27321 - protein, 146 aa, Homo sapiens
LVLCVHLVHLRSCIYPAHAIDPALFASPVAASGHEDRITGSQIHKPHQEDHPRNAWRLRSSLRLLHLETQDEDPAWGCQRFFACLTPMTPPGPYGSTQKQFSPTGGQLQPITISSLPQPLSSKHLLPVHPHPFPQTAFEKSLTYEL

SEQ ID NO: 27322 - protein, 126 aa, Homo sapiens
MDCGRVSLIWTVMRKDRITGSQIHKPHQEDHPRNAWRLRSSLRLLHLETQDEDPAWGCQRFFACLTPMTPPGPYGSTQKQFSPTGGQLQPITISSLPQPLSSKHLLPVHPHPFPQTAFEKSLTYEL

SEQ ID NO: 27323 - protein, 22 aa, Homo sapiens
MDCDADLGHDTWMCSSHLVIMR

SEQ ID NO: 27324 - protein, 121 aa, Homo sapiens
LSAKPALLWKDRITGSQIHKPHQEDHPRNAWRLRSSLRLLHLETQDEDPAWGCQRFFACLTPMTPPGPYGSTQKQFSPTGGQLQPITISSLPQPLSSKHLLPVHPHPFPQTAFEKSLTYEL

SEQ ID NO: 27325 - protein, 15 aa, Homo sapiens
LRLRMKTQLGAVKEA

SEQ ID NO: 27326 - protein, 18 aa, Homo sapiens
LRLRMKTQLGAVKGFLHV

SEQ ID NO: 27327 - protein, 70 aa, Homo sapiens
LFSTSLHMATCGSRDHTSLADMELGLKRQNTPEEPGATTQHHCGKTAAGNVLSPACSTSVHAFPPSGSLA

SEQ ID NO: 27328 - protein, 67 aa, Homo sapiens
MFFACLTPMTPPGPYGSTQKQFSPTGGQLQPITISSLPQPLSSKHLLPVHPHPFPQTAFEKSLTYEL

SEQ ID NO: 27329 - protein, 56 aa, Homo sapiens
LFHTFEMYEKPEIQDPPWPAPFFSPTVLRISQLSFTSLIEITVLMESVCGNERWLP

SEQ ID NO: 27330 - protein, 49 aa, Homo sapiens
VLAEAPSCRLLLLKHTQVQCSMISQLSFTSLIEITVLMESVCGNERWLP

SEQ ID NO: 27331 - protein, 109 aa, Homo sapiens
MERLCLQPGLLPTAVYLPHWERSSRDREEKEAPFFRLLSRRLMFCVHARQRTQNVPINKYQRLVVKMKEEEALREKLNMQNITHKENQNAGSLEMIDNMLKQEERRELK

SEQ ID NO: 27332 - protein, 10 aa, Homo sapiens
MEEGLRREDT

SEQ ID NO: 27333 - protein, 9 aa, Homo sapiens
LEGLRREDT

SEQ ID NO: 27334 - protein, 22 aa, Homo sapiens
VMPKLRSEITKISYEGLRREDT

SEQ ID NO: 27335 - protein, 28 aa, Homo sapiens
VMPKLRSEITKISYQTWKSCLRDQGAKR

SEQ ID NO: 27336 - protein, 69 aa, Homo sapiens
LGVNKETFRCCLSFSKFLVFMKIHNSWLQTQLLRIISGRMPKTAFQLQEWPFTVYPFGASPKHPTHCWL

SEQ ID NO: 27337 - protein, 102 aa, Homo sapiens
LLPIQRLAGPTEVCQEAPVHVGHLCADCLCASGCCGKPRQCSGHLPAKPALPADPAHAADGPERWHLEASGLSHLCPQQRTHHGLVHRFPDTHPFFISCLPG

SEQ ID NO: 27338 - protein, 85 aa, Homo sapiens
LPSIMTESCLRSPSHVSCTACGTTLKKNQKMETGIGSRDPMAKLQSATEANTPMDNPTCKLNVEHSLRKEVRRFNFEVGSLSYRQ

SEQ ID NO: 27339 - protein, 101 aa, Homo sapiens
VCGILSRYSFQAEIEHLMYLRHRQPEGKRPRQQPLLDRPTLQLRHQENSRYWQPLQLQTAEARPILTFQFTVDFEELLHIGYVNSYMYILESVLINSSIQF

SEQ ID NO: 27340 - protein, 29 aa, Homo sapiens
LSYFRKNYSPFCLTCLLLSCGYVKHWVGN

SEQ ID NO: 27341 - protein, 125 aa, Homo sapiens
VTTKAVLLALLMAGLALQPGTALLCYSCKAQVSNEDCLQVENCTQLGEQCWTARIRAVGLLTVISKGCSLNCVDDSQDYYVGKKNITCCDTDLCNASGAHALQPAAAILALLPALGLLLWGPGQL

SEQ ID NO: 27342 - protein, 131 aa, Homo sapiens
LQPTLGVVPQASVPLLTHPAQWEPVLVPEAHPNASLTMYVCAPVPHPDPPMALSRTPTRQIGSIDTDPPADGPSNPLCCCFHGPAFSTLNPVLRHLFPQEAFPAHPIYDLSQVWSVVSPAPSRGQALRRAR

SEQ ID NO: 27343 - protein, 86 aa, Homo sapiens [sequence omitted]

SEQ ID NO: 27344 - protein, 45 aa, Homo sapiens
LNRDLRLFLPSDLNGDISSLWVSSLLAFNQLFCLTAAGLGTAQPP

SEQ ID NO: 27345 - protein, 37 aa, Homo sapiens
MWQNLNGDISSLWVSSLLAFNQLFCLTAAGLGTAQPP

SEQ ID NO: 27346 - protein, 15 aa, Homo sapiens
MWQSKRVGQQSLVCH

SEQ ID NO: 27347 - protein, 73 aa, Homo sapiens
LFGALVACLPNSAASPRQEHFLPRLLKLVRGFPTSQKSFIGPPLETSDRSHRRLASGICPHPRGQLTMSQALC

SEQ ID NO: 27348 - protein, 56 aa, Homo sapiens
LGALQLVVHLVGSHPSFSLLPESHRLHETFTHPLRQQLCGSSFLKVRGSWPSYLWA

SEQ ID NO: 27349 - protein, 92 aa, Homo sapiens
LPLEPTCFQNYLFVELVSRTNLLSESLYFQSLFPGLTYFQNLLSKPACLQDHLLGELACSPRTGRPETAQLPAGLTRLCVSFRAFHTSLGVW

SEQ ID NO: 27350 - protein, 81 aa, Homo sapiens
MFTMGFLKTVLLGTSACVSPPTMPAFFSLPAERRLQAWPQSEAPLSVSSCFQNRPPEPASFQNLRPEPASLQNLRTEPTSF

SEQ ID NO: 27351 - protein, 16 aa, Homo sapiens
LPARAVSSCHPGNGTL

SEQ ID NO: 27352 - protein, 108 aa, Homo sapiens
LRLAAEPKSPGGGPAPGTRPAPAPHGPVPGPSPEPISMPQGEGQGHLSQKKTVTIPSGSTLAFRVAQLVIDSDLGELELGVSRAQALAEKQGGLGRATRQLGLPWAPG

SEQ ID NO: 27353 - protein, 268 aa, Homo sapiens [sequence omitted]

SEQ ID NO: 27354 - protein, 35 aa, Homo sapiens
LRPPRSACGPARLPPRRGGRFQRLKVSSSQVVPKV

SEQ ID NO: 27355 - protein, 121 aa, Homo sapiens
LAGSCFTGLSDHFSKGGEQTKPTQGKSACVRDGAPASGSPPRPLPPLLPRAARGWADPKRRRCTRRPEAQRRWQQGGREAQRPCPSPSVQSGGGAAPSLRVPAGRGGLADIRRDIRISDSN

SEQ ID NO: 27356 - protein, 89 aa, Homo sapiens
LAGTQSPRVDTAVGWWQGSSRCHQAHERWSLQRCEQLLEEEVLLKTLRPARLCPWCPGCLESLTPGPWGQDSRTLTTCPPPASAAAPPR

SEQ ID NO: 27357 - protein, 80 aa, Homo sapiens
LASQSAGITGLSHRAWPSTECLLRCEQLLEEEVLLKTLRPARLCPWCPGCLESLTPGPWGQDSRTLTTCPPPASAAAPPR

SEQ ID NO: 27358 - protein, 485 aa, Homo sapiens
LRTQGSWSWRHKREGCDSRIEKEEMIPKQDISEELESQRAKSEDHVRNIFKETEEMSKTEGKLENCWRKYAVEGVKNSFSQKSNFREITMRYVKTLSRENGQKFNAVGENCITDSNPAKHLRGSREESLHPSVSSVENLQQHEDLINLQSFQLGERAYQTDVLVKVPRQSSVLSENQRMNNPERWFESTGCGKTYNQNRAFNQHQRFHSGEKTYEHNECGKAFSWPSILSKHQRIHTGKKLYTCEDCGKSFSVHSYFIQHCKIHTREKPYECIKCGKAFSTHSSYVQHLKIHTGEKHHECNQCGKAFSHSSNLIHHQRIHSGEKPYKCKECGKAFNRQSNLIQHQRIHSGEKPYDCKECGKAFSTQLFLIQHQRIHTGEKPYECNECAKSFSLNRTLTVHQRIHTGEKPYRCNECGKSFSQCSQVIQHKRIHTGEKPYICNECGKSFGARLSLIQHQRIHTGEKPYGCSVCGKTFSQKGHLIQHQ

SEQ ID NO: 27359 - protein, 517 aa, Homo sapiens
LSFHIVVSFEDVAVPLSQEEWDCLIPAQRGLYKDVMMGTYGNLLSLGCDSRIEKEEMIPKQDISEELESQRAKSEDHVRNIFKETEEMSKTEGKLENCWRKYAVEGVKNSFSQKSNFREITMRYVKTLSRENGQKFNAVGENCITDSNPAKHLRGSREESLHPSVSSVENLQQHEDLINLQSFQLGERAYQTDVLVKVPRQSSVLSENQRMNNPERWFESTGCGKTYNQNRAFNQHQRFHSGEKTYEHNECGKAFSWPSILSKHQRIHTGKKLYTCEDCGKSFSVHSYFIQHCKIHTREKPYECIKCGKAFSTHSSYVQHLKIHTGEKHHECNQCGKAFSHSSNLIHHQRIHSGEKPYKCKECGKAFNRQSNLIQHQRIHSGEKPYDCKECGKAFSTQLFLIQHQRIHTGEKPYECNECAKSFSLNRTLTVHQRIHTGEKPYRCNECGKSFSQCSQVIQHKRIHTGEKPYICNECGKSFGARLSLIQHQRIHTGEKPYGCSVCGKTFSQKGHLIQHQ

SEQ ID NO: 27360 - protein, 52 aa, Homo sapiens
LLPTRRRLGASSHPHPFPAKVADGSQALEGALPRNSVCERVVPGPRRHFPSA

SEQ ID NO: 27361 - protein, 259 aa, Homo sapiens
VDVNWSIASPILEDELASTQSKLTLTQKRWLPDHTYTCQVTYQGNTFEDSAKKCADSNPQGVSTYLSRSSPFYLFIRKLPTITCLVVDLAPSKENVKLTWSQASGKSVAQVILRQEKQCNGTFTITSTLLVGTRDWIKGETYQCRVTHTHLQSTTKISGPCAPPQVYVFATLEEPRNQDKRTLTCLIQNFWPKDILVQWLYNEVQLPDTWHSMTQPRKTKGSGVLVFSCLEVTRAEWEQKNEFICSVVHETATGSQTVK

SEQ ID NO: 27362 - protein, 139 aa, Homo sapiens [sequence omitted]

SEQ ID NO: 27363 - protein, 84 aa, Homo sapiens
LNKQEVHPNPLIINEVEYLCAIGSCVSLIRCSCPFALLLSVGVALFFVSSYRISLYNKCNLTCICLHLFLPSICCSFTKATLFS

SEQ ID NO: 27364 - protein, 75 aa, Homo sapiens
LQVEMDSWKYLLKASVEPSITHCPQLLLLPSPAPSRSPGVPAADDVKCGVGPGRSCSMQQRSALCEKLKTCCNTS

SEQ ID NO: 27365 - protein, 37 aa, Homo sapiens
VRGAGSGPFVCAWARPGGASVLLLGPAGFWSSYRVVE

SEQ ID NO: 27366 - protein, 57 aa, Homo sapiens
MTFFVVVRVWYVPLRPTPIAAIYSTDLSSIPLAVLDVKMIFPAGIPSTKLKTLGMWK

SEQ ID NO: 27367 - protein, 18 aa, Homo sapiens
LLQFIALICHQYHLLSWM

SEQ ID NO: 27368 - protein, 45 aa, Homo sapiens
LATRYMLSVLKELKNTHQRRIFLEREGSSITVRCAGILSRVSTAF

SEQ ID NO: 27369 - protein, 81 aa, Homo sapiens
VCWNPFPSQYCFLEENRGDLFGMYLTPKKPSEVTVSYRQQVEHCGMHELLRPLQLSATWRLGPESRFMLCSTLVSCFCKSD

SEQ ID NO: 27370 - protein, 46 aa, Homo sapiens
LVTLPVATLEKTLEDDYGARNFLRSWVIKGHWTKTQIASFYTRIHH

SEQ ID NO: 27371 - protein, 101 aa, Homo sapiens
LAVAEAAAGERRSLERAPPPPFPATPDLAHALARSLPADTLDYGAFPPPPVDTSGWRLAIRLVEVEWVQGPSGPPTCTVPLPLAPASFPGERPSQQRRDGF

SEQ ID NO: 27372 - protein, 47 aa, Homo sapiens
LDSMRNLKASLENSLREVEARYALQMEQLNGILLHLESELAQTWAEG

SEQ ID NO: 27373 - protein, 115 aa, Homo sapiens [sequence omitted]

SEQ ID NO: 27374 - protein, 52 aa, Homo sapiens
LGGKATTASEAKAVLSAKQLSDEEVHAGVGEPLRSLSNSTARNVTWKLCSRL

SEQ ID NO: 27375 - protein, 100 aa, Homo sapiens
LANFVFLVEMGFLHVGQAGLKLLTSGDLPTSASQSAGIIGVSHRAGCLKSIYLTFPTRKFFVQMSICDFKVEIEGKIGFISVPISLQSILHIVNNFFFFF

SEQ ID NO: 27376 - protein, 31 aa, Homo sapiens
LQRAQDSMANVVYTQVIPGTTLIYCTRLSSL

SEQ ID NO: 27377 - protein, 17 aa, Homo sapiens
LPVPFWVLSGVATIANL

SEQ ID NO: 27378 - protein, 9 aa, Homo sapiens
LKRPLTLRK

SEQ ID NO: 27379 - protein, 37 aa, Homo sapiens
MDSTVILSCVRSKNLLVGSGLGPFSGNIFLVTMKGQY

SEQ ID NO: 27380 - protein, 60 aa, Homo sapiens
LPSSANSSDNRTLFQWNISRHLCSTRHKMRRADTRFSPSEKKICIYIFKNWLDGGFLPNT

SEQ ID NO: 27381 - protein, 160 aa, Homo sapiens [sequence omitted]

SEQ ID NO: 27382 - protein, 128 aa, Homo sapiens
VARTSASPSPHTPERSPLPWGGQEGRRGVAAGKLPTLGARCGGEGVGAAGQLRRAARRRQRLKCPGASPESRDGPEPGGKAPRTNTAPCTIRAKMTAAKLLRNTTGKRGSLRSIYPPPPRGCGVPRRM

SEQ ID NO: 27383 - protein, 90 aa, Homo sapiens [sequence omitted]

SEQ ID NO: 27384 - protein, 20 aa, Homo sapiens
LLSARLRRPGKGVTGRMLEA

SEQ ID NO: 27385 - protein, 26 aa, Homo sapiens
LSRGTVARLASLRLVVAVDIAARLEG

SEQ ID NO: 27386 - protein, 98 aa, Homo sapiens
LHSYRSRSCGGTEAGQIHQEPSNMKRDARKKREARKQANRTIPTSEQEKMGACWQSWGLAVVTLNLLFGVFMSGGKNRDHMEPTQEALAVTQQAGRQF

SEQ ID NO: 27387 - protein, 40 aa, Homo sapiens
MEMKLRRMLRKSGRGPWREARETLRGQPRPSAPREKRKAA

SEQ ID NO: 27388 - protein, 76 aa, Homo sapiens
LEGLGKAARMEMKLRRMLRKSGRGPWREARETLRGQPRPSAPREKRPSLLLSVTISESWLATQSSNIDQQQEILSI

SEQ ID NO: 27389 - protein, 342 aa, Homo sapiens
MKKKQQKEKEVIVRQLQEELADHLKKFSMSESPLEGTSYCHINLDETRTSKKKLFQVESQPEEKHEELGKLFELISSLDCNVDQIRKKNHELEEEATGCKKCLETTINMLNVFGNEDFSCHGDLNTDQLKMDILFKKLKQKFDDLMAEKEAVSSKCVNLAKDNEVLHQELLSMRKVQEKCEKLEKDKKMLEEEVLNLKTHMEKDMVELGKAQEYKSELDERAMQAIEKLEEIHLQEQAEYEKQLEQLNKDNTASLKKKELTVKDVECKFSKMKTAYEEVTTELEEYKEAFAVALKANNSISEKIMKSDKKIAVISTKLLMEKERMIFSQHSSYEARPRVTLC

SEQ ID NO: 27390 - protein, 335 aa, Homo sapiens
MMHNIIVKELIVTFFLGITVVQMLISVTGLKGVEAQNGSESEVFVENYETLVFYWPSLLCLAFLLGRFLHMFVKALRVHLGWELQVEEKSVLEVHQGEHVKQLLRIPRPQEKKKSWFQTRIYEWDPCFQFPSRMIGTIVLAFICLYLFIVIEFCVFVYVRDELDVLENNLESYITFTNHSGVLTPVILQVKELISVTKGVWVATILPAYLTCVSYLFHILVCYRKHMKRLWAGDKHFLPLKFHNPASSESMVAIARYSGWQIAYILWGYLIIHMVQSLCGMAIMYSLVLPIVQTRAWKCCKGWALGCKCWAGILSLTCSESWGPPNCYVDPWSWP

SEQ ID NO: 27391 - protein, 1013 aa, Homo sapiens
LHFFPHLIQENEVSRLEDIMQHLKSKKREERWMRASKRQSEKEMEELHHNIDDLLQEKKSLECEVEELHRTVQKRQQQKDFIDGNVESLMTELEIEKSLKHHEDIVDEIECIEKTLLKRRSELREADRLLAEAESELSCTKEKTKNAVEKFTDAKRSLLQTESDAEELERRAQETAVNLVKADQQLRSLQADAKDLEQHKIKQEEILKEINKIVAAKDSDFQCLSKKKEKLTEELQKLQKDIEMAERNEDHHLQVLKESEVLLQAKRAELEKLKSQVTSQQQEMAVLDRQLGHKKEELHLLQGSMVQAKADLQEALRLGETEVTEKCNHIREVKSLLEELSFQKGELNVQISERKTQLTLIKQEIEKEEENLQVVLRQMSKHKTELKNILDMLQLENHELQGLKLQHDQRVSELEKTQVAVLEEKLELENLQQISQQQKGEIEWQKQLLERDKREIERMTAESRALQSCVECLSKEKEDLQEKCDIWEKKLAQTKRVLAAAEENSKMEQSNLEKLELNVRKLQQELDQLNRDKLSLHNDISAMQQQLQEKREAVNSLQEELANVQDHLNLAKQDLLHTTKHQDVLLSEQTRLQKDISEWANRFEDCQKEEETKQQQLQVLQNEIEENKLKLVQQEMMFQRLQKERESEESKLETSKVTLKEQQHQLEKELTDQKSKLDQVLSKVLAAEERVRTLQEEERWCESLEKTLSQTKRQLSEREQQLVEKSGELLALQKEADSMRADFSLLRNQFLTERKKAEKQVASLKEALKIQRSQLEKNLLEQKQENSCIQKEMATIELVAQDNHERARRLMKELNQMQYEYTELKKQMANQKDLERRQMEISDAMRTLKSEVKDEIRTSLKNLNQFLPELPADLEAILERNENLEGELESLKENLPFTMNEGPFEEKLNFSQVHIMDEHWRGEALREKLRHREDRLKAQLRHCMSKQAEVLIKGKRQTEGTLHSLRRQVDALGELVTSTSADSASSPSLSQLESSLTEDSQLGQNQEKNASAR

SEQ ID NO: 27392 - protein, 57 aa, Homo sapiens [sequence omitted]

SEQ ID NO: 27393 - protein, 224 aa, Homo sapiens
VPGSAPPLTALPDPAGAGSGRAAAAARGGGGGGAGSSRAAASRPRAGAGASGAEPRSGRERSRLSGRRAPAMARNTLSSRFRRVDIDEFDENKFVDEQEEAAAAAAEPGPDPSEVDGLLRQGDMLRAFHAALRNSPVNTKNQAVKERAQGVVLKVLTNFKSSEIEQAVQSLDRNGVDLLMKYIYKGFEKPTENSSAVLLQWHEKALAVGGLGSIIRVLTARKTV

SEQ ID NO: 27394 - protein, 12 aa, Homo sapiens
LHVLVALITVMI

SEQ ID NO: 27395 - protein, 32 aa, Homo sapiens
MLGPLLDFHACCQHPGGAPEMSAGGSEYPPFW

SEQ ID NO: 27396 - protein, 101 aa, Homo sapiens
LLPAPRGSSGNVCWGLGIPTFLVMQPSGSQPRFPALTQNGVALVRTPLTSVYLRVRPILPAGLCLGVTLPELAPTTVATVMLMCDCCQEPAHMTVWRKFFP

SEQ ID NO: 27397 - protein, 101 aa, Homo sapiens
LIDGVRGRRQMTAFGLGIPTFLVMQPSGSQPRFPALTQNGVALVRTPLTSVYLRVRPILPAGLCLGVTLPELAPTTVATVMLMCDCCQEPAHMTVWRKFFP

SEQ ID NO: 27398 - protein, 8 aa, Homo sapiens
MGCGDGDK

SEQ ID NO: 27399 - protein, 35 aa, Homo sapiens
LRTIWSGRVHYPSLNTPSPRGPLEHPVEPAPTQRP

SEQ ID NO: 27400 - protein, 102 aa, Homo sapiens
LSPENALGGEPGDECRALGLLSRKTGFCHVGQAGLELLTSSDPPASASQSAGITGVSHCTRPQAGIFTSRILLHCALFVFIISPPDGCLRHFQSSVIKNTMQ

SEQ ID NO: 27401 - protein, 13 aa, Homo sapiens
MRWVVSLGTNAEP

SEQ ID NO: 27402 - protein, 49 aa, Homo sapiens
MRKASQVEPEAVITPVVKGAALVLPERLPPSLQRHSKSPPCWKEEQGLD

SEQ ID NO: 27403 - protein, 277 aa, Homo sapiens
MLPLNCVCFLQDDPFQMKTGGMVDMKKLKERGKDKISEEEDLHLGTSFSAETNRRDEDADMMKYIETELKKRKGIVEHEEQKVKPKNAEDCLYELPENIRVSSAKKTEEMLSNQMLSGIPEVDLGIDAKIKNIISTEDAKARLLAEQQNKKKDSETSFVPTNMAVNYVQHNRFYHEELNAPIRRNKEEPKARPLRVGDTEKPEPERECNKGLGAAWSAQQCGNPWRQDAAGDRVEPGIGAGAYGFQSMLWTMTMCLPLSKPQFPHWNPNRTYLLGLL

SEQ ID NO: 27404 - protein, 208 aa, Homo sapiens
LFHNTRLVVAYKPNFMTQWFAVQRGLHGYGEPLRDVFPPCLCLKGREARRMPWKHPASHPGLCGARLGAHAVGQKAAEARSVPAGEQRPRSPAWGQALTDPQGSPQGAVCLDRLSHPRVASGHMQGMVLLAVARTGSPRSQQTWPPKVSKPPLCYVELTASHVNTRVWVAWGDPPSCVVAVSGKHPLPLPWAAPAPVRPGSPTVVMQT

SEQ ID NO: 27405 - protein, 116 aa, Homo sapiens
MAEVLRTLAGKPKCHALRPMILFLIMLVLVLFGYGVLSPRSLMPGSLERGFCMAVREPDHLQRLVAKDGLPPAKVLTPCRKDVLVVPLGWLPLSGRAHSTSTSSTSSSGSRTPPLG

SEQ ID NO: 27406 - protein, 165 aa, Homo sapiens [sequence omitted]

SEQ ID NO: 27407 - protein, 56 aa, Homo sapiens
VTEEAVHSHVTMKESQRAFCTMHFYYYFPILSTISLRNLEYNQDPPLHATVAAFHE

SEQ ID NO: 27408 - protein, 58 aa, Homo sapiens
LCNAVGCVLWSCPRSPGRGHAVGQGLEGGGGCPWATPPSLGGADFCNTKYSLWQKKCL

SEQ ID NO: 27409 - protein, 45 aa, Homo sapiens
VGRERAPGTTSRLKVFRGQKFEPGLRKDPALAVAALGDNWRLKFA

SEQ ID NO: 27410 - protein, 19 aa, Homo sapiens
MRMPAQGPARPWSSAAVIQ

SEQ ID NO: 27411 - protein, 32 aa, Homo sapiens
LSSSRLKPRGLQGVQPPGCLLRSLHVPIHCSP

SEQ ID NO: 27412 - protein, 43 aa, Homo sapiens
VSSLQGASYAASTSPSTAAPDHRAHRGAFAGRRASGSAAPSDF

SEQ ID NO: 27413 - protein, 62 aa, Homo sapiens
VEDAASNVSAHSAGLCGCCQTDLPPPGSLGCTWGARGWAPGQRSLRASLRMRIGTGQRARTG

SEQ ID NO: 27414 - protein, 42 aa, Homo sapiens
LGSHVCGAGIQSPDGTAAAGTRYAAAGPTRTWLPPGTPGCPC

SEQ ID NO: 27415 - protein, 71 aa, Homo sapiens
LCQEAGWNKGMGRLAWGQPLPLPGCCCVFLPARGHCQDHASLFISRFLSSAIVVFWWRKKNRVAVFELPGT

SEQ ID NO: 27416 - protein, 90 aa, Homo sapiens
LLASGCGVGAGSDLGRPGRASRGMGARAAEEAPLVCPLVERALPALRGFQPGSFGKPGRLLTGDDTCVGCWHSCYLTREGGDFACDGLPV

SEQ ID NO: 27417 - protein, 87 aa, Homo sapiens
LLASGCGVGAGSDLGRPGRASRGMGARAAEEAPLVCPLVERALPALRGFQPGSFGKPGRLLTGDDTCVGCWVSWCIGAGTGSILQCN

SEQ ID NO: 27418 - protein, 92 aa, Homo sapiens [sequence omitted]

SEQ ID NO: 27419 - protein, 301 aa, Homo sapiens
LGEAGAVPGDPLSTGCSQAQLGGCCPRGPWGPQHGGQQRAAGPTLPRGERGGPQQSGPGLAAQTPPTSKQVAWRAFLTGTYRSQSPRSPAGPFRGGTGWWPEPAVCLCVAAGPQRLSSPGLVYNASGSEHCYDIYRLYHSCADPTGCGTGPDARAWDYQACTEINLTFASNNVTDMFPDLPFTDELRQRYCLDTWGVWPRPDWLLTSFWGGDLRAASNIIFSNGNLDPWAGGGIRRNLSASVIAVTIQGGAHHLDLRASHPEDPASVVEARKLEATIIGEWVKAARREQQPALRGGPRLSL

SEQ ID NO: 27420 - protein, 192 aa, Homo sapiens
LIWNIVSLLECKSMVPRTIPGVQETKYLLTGPGAVAHASSQSTGITGGSHRARPGPVHFIDKVTDKPSHSHPFALKENWNLNPEPSSPPSPLFLEAPSRQASQHHGASPGAGTSAGCPFEKCCSTEPCLSGLGDVGRGEAASLRARPGSGASRGQGPGSRVSCRRDLGKPLHAPAGFSAGEVHTTPLGNLGA

SEQ ID NO: 27421 - protein, 632 aa, Homo sapiens
LFFLQPRCAHRGLRAQKCGRPAPGVDAMVLCPVIGKLLHKRVVLASASPRRQEILSNAGLRFEVVPSKFKEKLDKASFATPYGYAMETAKQKALEVANRLYQTVGGLILEKPVDKQDAYRMLSRLSGREHSVFTGVAIVHCSSKDHQLDTRVSEFYEETKVKFSELSEELLWEYVHSGEPMDKAGGYGIQALGGMLVESVHGDFLNVVGFPLNHFCKQLVKLYYPPRPEDLRRSVKHDSIPAADTFEDLSDVEGGGSEPTQRDAGSRDEKAEAGEAGQATAEAECHRTRETLPPFPTRLLELIEGFMLSKGLLTACKLKVFDLLKDEAPQKAADIASKVDASACGMERLLDICAAMGLLEKTEQGYSNTETANVYLASDGEYSLHGFIMHNNDLTWNLFTYLEFAIREGTNQHHRALGKKAEDLFQDAYYQSPETRLRFMRAMHGMTKLTACQVATAFNLSRFSSACDVGGCTGALARELAREYPRMQVTVFDLPDIIELAAHFQPPGPQAVQIHFAAGDFFRDPLPSAELYVLCRILHDWPDDKVHKLLSRVAESCKPGAGLLLVETLLDEEKRVAQRALMQSLNMLVQTEGKERSLGEYQCLLELHGFHQVQVVHLGGVLDAILATKVAP

SEQ ID NO: 27422 - protein, 73 aa, Homo sapiens
MQTLNKKQTEKKVWNVLYFRQVAAREPASCCLPKFHFAELVLKTGRWPGVVAHAEVRSSRPAWPTNMVKPRVY

SEQ ID NO: 27423 - protein, 719 aa, Homo sapiens
LNFPAQSRRLPGPQQCSPGAEQGASARARRPRPRPRPAAMVPGVPGAVLTLCLWLAASSGCLAAGPGAAAARRLDESLSAGSVQRARCASRCLSLQITRISAFFQHFQNNGSLVWCQNHKQCSKCLEPCKESGDLRKHQCQSFCEPLFPKKSYECLTSCEFLKYILLVKQGDCPAPEKASGFAAACVESCEVDNECSGVKKCCSNGCGHTCQVPKTLYKGVPLKPRKELRFTELQSGQLEVKWSSKFNISIEPVIYVVQRRWNYGIHPSEDDATHWQTVAQTTDERVQLTDIRPSRWYQFRVAAVNVHGTRGFTAPSKHFRSSKDPSAPPAPANLRLANSTVNSDGSVTVTIVWDLPEEPDIPVHHYKVFWSWMVSSKSLVPTKKKRRKTTDGFQNSVILEKLQPDCDYVVELQAITYWGQTRLKSAKVSLHFTSTHATNNKEQLVKTRKGGIQTQLPFQRRRPTRPLEVGAPFYQDGQLQVKVYWKKTEDPTVNRYHVRWFPEACAHNRTTGSEASSGMTHENYIILQDLSFSCKYKVTVQPIRPKSHSKAEAVFFTTPPCSALKGKSHKPVGCLGEAGHVLSKVLAKPENLSASFIVQDVNITGHFSWKMAKANLYQPMTGFQVTWAEVTTESRQNSLPNSIISQSQILPSDHYVLTVPNLRPSTLYRLEVQVLTPGGEGPATIKTFRTPELPPSSAHRSHLKHRHPHHYKPSPERY

SEQ ID NO: 27424 - protein, 66 aa, Homo sapiens
VPLGGDIKKFLSVCPQSFSSATMSDKPDMAEIEKFDKSKLKKTETQEKNPLPSKETIEQEKQAGES

SEQ ID NO: 27425 - protein, 42 aa, Homo sapiens
VVGSSSRGRRLCERTRKPDPARILAERPRLGNGNAFPTWAPF

SEQ ID NO: 27426 - protein, 152 aa, Homo sapiens [sequence omitted]

SEQ ID NO: 27427 - protein, 99 aa, Homo sapiens
VQIPDCTHRTVDKRASIHVAPECPGGRQRGAPRQTGSACRTARRPVKPTQASQQEQKRGPVAVSTASSTFTLLISALLEVFTTSMCFHNTTSGKKGKKL

SEQ ID NO: 27428 - protein, 14 aa, Homo sapiens
LADLGQQAEVVPGC

SEQ ID NO: 27429 - protein, 48 aa, Homo sapiens
LDHFGDPYWYMRKAPIPDSQSIDSDWITLVLEVYLGDGITLYKHPRCH

SEQ ID NO: 27430 - protein, 295 aa, Homo sapiens
LQPWQTMYKREVLDLRGFRWTHYTFNITEDTLRGFFEPFGRIESIQLTIDSETGRSKGYGFITFSDSECAKKSLEQFNGFELAGRPMKVGHVIERADASSTSSFLDSDELERTRIDLGTTGRLQLVARLAEDTGLQIPPAAQQALQMSGSLAFGAVAEFSFVMDLQTRLSQQTEASALAAAASVQPLATQCFQLSNMFNPQTEEVGWDTEIKDDVIEECNKHGGIIHIYVDKNSAQGNVYVKCSSIAAAIAAVNALHGRWFAGKMITAAYVPLPTYHNLFPDSMTATQLLVPSRR

SEQ ID NO: 27431 - protein, 18 aa, Homo sapiens
LNRVQRKDRKKADHLSNE

SEQ ID NO: 27432 - protein, 22 aa, Homo sapiens
LREDPEVTPSKTGKMPSESTWP

SEQ ID NO: 27433 - protein, 55 aa, Homo sapiens
LREDPEVTPSKTGKMPSERPDGLVLVFSRLKVLHQVSCCCYLRKKSHKGVKSTWP

SEQ ID NO: 27434 - protein, 22 aa, Homo sapiens
VKLQVESVGNQQVERGSRSNPF

SEQ ID NO: 27435 - protein, 188 aa, Homo sapiens
MESILQALEDIQLDLEAVNIKAGKAFLRLKRKFIQMRRPFLERRDLIIQHIPGFWVKAFLNHPRISILINRRDEDIFRYLTNLQVRPERHFLVGSGTNLVLGGDGRWVGRAVVCWGGDRFHHHPHLEQVQDLRHISMGYKMKLYFQTNPYFTNMVIVKEFQRNRSGKWQYQSKSMFPPSICPCFVPSP

SEQ ID NO: 27436 - protein, 179 aa, Homo sapiens
LINRRDEDIFRYLTNLQVRPERHFLVGSGTNLVLGGDGRWVGRAVVCWGGDRFHHHPHLEQVQDLRHISMGYKMKLYFQTNPYFTNMVIVKEFQRNRSGRLVSHSTPIRWHRGQEPQARRHGNQDASHSFFSWFSNHSLPEADRIAEIIKNDLWVNPLRYYLRERGSRIKRKKQEMKKR

SEQ ID NO: 27437 - protein, 317 aa, Homo sapiens
LLSEEVELYGETKAKVLLSALERLKHQPVGKYQVVTGITPTPLGEGKSTTTIGLVQALLAHLYQNFFMCVRQPSQGPTFGIKGGVAGGGYSQVIPMEEFNLHLTGDIHAITVSNNLVAAAIDAQIFHELTQTDKATFTHLVPSVNGVRKFSDIHIQRLNRLGIDKTDSTTLTDEEINRFARLDIDPETIAWQRVLNTNDRFLRKITIGQAPTKKSHTQTVHFDISVASEIMAVLALTTSLEDRRERLGKMVVASSKKGDPVSAEDLGVSGALIVLMKDTIKPNLMQRLEGTPVFVHAGPFAIIAHGNSSIIADRITL

SEQ ID NO: 27438 - protein, 188 aa, Homo sapiens [sequence omitted]

SEQ ID NO: 27439 - protein, 405 aa, Homo sapiens
LHSSLGDRARFRGLGGGAGFRAGALPLRWRALRPCEMDGTEGSVGQPGPTERSHRSSVSSVGARAADVLVYLADDTVVPLAVENLPSLRAHELHCAVREVLKLPDIALDVFALWLVSPLLEVQLKPKNQPYKLGRQWPELLLRFTSAPDDDVAMDEPFLQFRRNVFFPKGRELQIPDEEVLRLLYEEAKGNVLAARYLCDVEDCEALGALVCRVQLVTYQPDWPAACDLREKLDSFLPAHLCKRGQGLFAALRGRGARAGPGEQSLLNAYRKVQEVSSDGGCEAALGTHYRAYLLKCHKLPFYGCAFFHGEVDKPAQGFLHRGGRKSVSVAISLEGVHVVDSREKHVLLGLCFQELSWDHTSPEEEEPILWLEFDRDSGVTPVNKLLKIYSKQAELMSSLIEYCI

SEQ ID NO: 27440 - protein, 821 aa, Homo sapiens
LESASPASPPARNMWLRLGPPSLSLSPKPTVGRSLCLTLWFLSLALRASTQAPAPTVNTHFGKLRGARVPLPSEILGPVDQYLGVPYAAPPIGEKRFLPPEPPPSWSGIRNATHFPPVCPQNIHTAVPEVMLPVWFTANLDIVATYIQEPNEDCLYLNVYVPTEDDIRDSGAKPVMVYIHGGSYMEGTGNMIDGSILASYGNVIVITLNYRVGVLGFLSTGDQAAKGNYGLLDQIQALRWVSENIAFFGGDPRRITVFGSGIGASCVSLLTLSHHSEGLFQRAIIQSGSALSSWAVNYQPVKYTSLLADKVGCNVLDTVDMVDCLRQKSAKELVEQDIQPARYHVAFGPVIDGDVIPDDPEILMEQGEFLNYDIMLGVNQGEGLKFVEGVVDPEDGVSGTDFDYSVSNFVDNLYGYPEGKDTLRETIKFMYTDWADRDNPETRRKTLVALFTDHQWVEPSVVTADLHARYGSPTYFYAFYHHCQSLMKPAWSDAAHGDEVPYVFGVPMVGPTDLFPCNFSKNDVMLSAVVMTYWTNFAKTGDPNKPVPQDTKFIHTKANRFEEVAWSKYNPRDQLYLHIGLKPRVRDHYRATKVAFWKHLVPHLYNLHDMFHYTSTTTKVPPPDTTHSSHITRRPNGKTWSTKRPAISPAYSNENAQGSWNGDQDAGPLLVENPRDYSTELSVTIAVGASLLFLNVLAFAALYYRKDKRRQEPLRQPSPQRGAGAPELGAAPEEELAALQLGPTHHECEAGPPHDTLRLTALPDYTLTLRRSPDDIPLMTPNTITMIPNSLVGLQTLHPYNTFAAGFNSTGLPHSHSTTRV

SEQ ID NO: 27441 - protein, 841 aa, Homo sapiens
LESASPASPPARNMWLRLGPPSLSLSPKPTVGRSLCLTLWFLSLALRASTQAPAPTVNTHFGKLRGARVPLPSEILGPVDQYLGVPYAAPPIGEKRFLPPEPPPSWSGIRNATHFPPVCPQNIHTAVPEVMLPVWFTANLDIVATYIQEPNEDCLYLNVYVPTEDGSGAKKQGEDLADNDGDEDEDIRDSGAKPVMVYIHGGSYMEGTGNMIDGSILASYGNVIVITLNYRVGVLGFLSTGDQAAKGNYGLLDQIQALRWVSENIAFFGGDPRRITVFGSGIGASCVSLLTLSHHSEGLFQRAIIQSGSALSSWAVNYQPVKYTSLLADKVGCNVLDTVDMVDCLRQKSAKELVEQDIQPARYHVAFGPVIDGDVIPDDPEILMEQGEFLNYDIMLGVNQGEGLKFVEGVVDPEDGVSGTDFDYSVSNFVDNLYGYPEGKDTLRETIKFMYTDWADRDNPETRRKTLVALFTDHQWVEPSVVTADLHARYGSPTYFYAFYHHCQSLMKPAWSDAAHGDEVPYVFGVPMVGPTDLFPCNFSKNDVMLSAVVMTYWTNFAKTGDPNKPVPQDTKFIHTKANRFEEVAWSKYNPRDQLYLHIGLKPRVRDHYRATKVAFWKHLVPHLYNLHDMFHYTSTTTKVPPPDTTHSSHITRRPNGKTWSTKRPAISPAYSNENAQGSWNGDQDAGPLLVENPRDYSTELSVTIAVGASLLFLNVLAFAALYYRKDKRRQEPLRQPSPQRGAGAPELGAAPEEELAALQLGPTHHECEAGPPHDTLRLTALPDYTLTLRRSPDDIPLMTPNTITMIPNSLVGLQTLHPYNTFAAGFNSTGLPHSHSTTRV

SEQ ID NO: 27442 - protein, 861 aa, Homo sapiens
LESASPASPPARNMWLRLGPPSLSLSPKPTVGRSLCLTLWFLSLALRASTQAPAPTVNTHFGKLRGARVPLPSEILGPVDQYLGVPYAAPPIGEKRFLPPEPPPSWSGIRNATHFPPVCPQNIHTAVPEVMLPVWFTANLDIVATYIQEPNEDCLYLNVYVPTEDVKRISKECARKPNKKICRKGGSGAKKQGEDLADNDGDEDEDIRDSGAKPVMVYIHGGSYMEGTGNMIDGSILASYGNVIVITLNYRVGVLGFLSTGDQAAKGNYGLLDQIQALRWVSENIAFFGGDPRRITVFGSGIGASCVSLLTLSHHSEGLFQRAIIQSGSALSSWAVNYQPVKYTSLLADKVGCNVLDTVDMVDCLRQKSAKELVEQDIQPARYHVAFGPVIDGDVIPDDPEILMEQGEFLNYDIMLGVNQGEGLKFVEGVVDPEDGVSGTDFDYSVSNFVDNLYGYPEGKDTLRETIKFMYTDWADRDNPETRRKTLVALFTDHQWVEPSVVTADLHARYGSPTYFYAFYHHCQSLMKPAWSDAAHGDEVPYVFGVPMVGPTDLFPCNFSKNDVMLSAVVMTYWTNFAKTGDPNKPVPQDTKFIHTKANRFEEVAWSKYNPRDQLYLHIGLKPRVRDHYRATKVAFWKHLVPHLYNLHDMFHYTSTTTKVPPPDTTHSSHITRRPNGKTWSTKRPAISPAYSNENAQGSWNGDQDAGPLLVENPRDYSTELSVTIAVGASLLFLNVLAFAALYYRKDKRRQEPLRQPSPQRGAGAPELGAAPEEELAALQLGPTHHECEAGPPHDTLRLTALPDYTLTLRRSPDDIPLMTPNTITMIPNSLVGLQTLHPYNTFAAGFNSTGLPHSHSTTRV

SEQ ID NO: 27443 - protein, 51 aa, Homo sapiens
MPNERRVPWSTKFREPCYTIKGLGKSSKETYFPNLFDHELLFFSAIPLNTS

SEQ ID NO: 27444 - protein, 35 aa, Homo sapiens
LEDLQPKDGRPLSQSLPRWIEDPSEKVSGITTTTD

SEQ ID NO: 27445 - protein, 26 aa, Homo sapiens
LPDRCRTSAIRASIVERFLMPGCHVR

SEQ ID NO: 27446 - protein, 53 aa, Homo sapiens
LANAGDVKRSAQLREQFALLAPRTAVKKSLWLFRILDPIEDTTLHVSLVVMSP

SEQ ID NO: 27447 - protein, 47 aa, Homo sapiens
LANAGDVKRSAQLREQFALLAPRTAVKKSLWLFRILIPLKIPRCMCP

SEQ ID NO: 27448 - protein, 28 aa, Homo sapiens
LHSAGGRRQPVFCWTVKMLSPNCHSFAY

SEQ ID NO: 27449 - protein, 35 aa, Homo sapiens
VLFVLGFAAGTIWQALSYVYHGFCHVDIMAGLPHC

SEQ ID NO: 27450 - protein, 25 aa, Homo sapiens
LCFVRLSKMADPVLSQCSSGGKATS

SEQ ID NO: 27451 - protein, 184 aa, Homo sapiens [sequence omitted]

SEQ ID NO: 27452 - protein, 44 aa, Homo sapiens
LTSLFFVDQFFTLPLSFLYFAHRGCGYLVLLFFLCPTGPWIPAF

SEQ ID NO: 27453 - protein, 63 aa, Homo sapiens
LPLMLLHVVKPPLPVYPDQDLASRIQGCLCEMISLGPQAGHSQHRDVIDCTTVIRLSSALREK

SEQ ID NO: 27454 - protein, 20 aa, Homo sapiens
LIKKKWGKDLNRHFFKDDRK

SEQ ID NO: 27455 - protein, 75 aa, Homo sapiens
VSILPKAIYRFNAIPIKISSAFFTEIEKNHTISVDPQKIPNNQSNSEKKKSWRHHTSQFKFILQNESNQNNTVLA

SEQ ID NO: 27456 - protein, 24 aa, Homo sapiens
MLCRRYHYLVPEHCHHPQNKSCIH

SEQ ID NO: 27457 - protein, 124 aa, Homo sapiens
LSLMKRSNILAVMLFLISWMSTSISPLYPSLLVWISRYTTASSCSPSLGAGPAGTPRRSPSTVAAAPQRWPPPLTLRWHTSPYPPESPSTCCLYRQALGSWPLALCLQHCHLHVDWEPHSPRTC

SEQ ID NO: 27458 - protein, 7 aa, Homo sapiens
MDSEACL

SEQ ID NO: 27459 - protein, 27 aa, Homo sapiens
LTEGVVLETMLEAAPDALSIFFPLILS

SEQ ID NO: 27460 - protein, 66 aa, Homo sapiens [sequence omitted]

SEQ ID NO: 27461 - protein, 21 aa, Homo sapiens
MRHPTSFPRLLPRLSSQVFGR

SEQ ID NO: 27462 - protein, 15 aa, Homo sapiens
VVGRMAETWTSESSW

SEQ ID NO: 27463 - protein, 71 aa, Homo sapiens
LIPGWPENLSLVKSNIKICLLLILMLPAQQVHQRARMNYGCHECPCEAVGKPWLDCEGYLKSILESTRSSM

SEQ ID NO: 27464 - protein, 43 aa, Homo sapiens
LQVHQRARMNYGCHECPCEAVGKPWLDCEGYLKSILESTRSSM

SEQ ID NO: 27465 - protein, 12 aa, Homo sapiens
MARKLVIGQEQH

SEQ ID NO: 27466 - protein, 30 aa, Homo sapiens
LSPAWLTSSEVIRELGEAQISILHLVIKPL

SEQ ID NO: 27467 - protein, 53 aa, Homo sapiens
MAIAHCCLLEIVGGRKDGSPGPVSYTALHLTHFSAFRVMPHSIRNYATAEEVY

SEQ ID NO: 27468 - protein, 18 aa, Homo sapiens
MKVMPHSIRNYATAEEVY

SEQ ID NO: 27469 - protein, 21 aa, Homo sapiens
MARGEVMPHSIRNYATAEEVY

SEQ ID NO: 27470 - protein, 20 aa, Homo sapiens
LGRTVMPHSIRNYATAEEVY

SEQ ID NO: 27471 - protein, 60 aa, Homo sapiens
LPLRPAAAIQACLSLSLSFMPLSPPHLGTASSKNSCYDTEFNQEVMPHSIRNYATAEEVY

SEQ ID NO: 27472 - protein, 45 aa, Homo sapiens
LIFFPENIGVRIWMCFQMLVTLCRKPGIWTYGCLGLILSWRKIEK

SEQ ID NO: 27473 - protein, 13 aa, Homo sapiens
LEFSYAVARSTRN

SEQ ID NO: 27474 - protein, 305 aa, Homo sapiens
LTQEHIEALLYKFVGEHIPPSIYLEAYEEYTSKLDTLQQREQQLLECLGNGTDFSVSSSASMDTVKSSSSFSLSVFLFQFFKKPLSLSVFRNPIDVTWSNPKSPQKPIVRVFLPNKQRTVVPARCGVTVGDSLKKALMMRGLIPECGAVYRIQDGEKKTIDQDTGVSWLTGEELHVEVLENVPLTTHNFVRKTFFTLAFCDFCQKLLFQGFRCQTCGYKFHQCCSTVVPLMFVNYDHLDLLFFSKFFERHSIPQEEASLAETALTSGSSPSAPPSDSTGPQILTNLSPSKSTPIPQPFRPADEDH

SEQ ID NO: 27475 - protein, 1995 aa, Homo sapiens
MADYALLEDCPYVDDCVFAAEFMTDDYVRVTQLYCDGVGKQYKDYVQSERNLEFDICSIWCSKPISVLQDYCDAIKINIFWPLLFQHQNSSVISRLHPCVDANNSRASEINLKRLQHLELMEDIVDLAKKAANDSLLIGGLLRIGYKIENKILAMEEALNWIKYAGDVTILTKLGSIDNCWPMLSIFFTEYKYHITKIVMEDCNLLEELKTQSCMDCIEQGELMKMKGNEEFSKERFDIAIIYYTRAIEYRPENHLLYGNRALCFLRTGQFRNALGDGKRATILKNTWPKGHYRYCDALSMLGEYNWALQANITAQKLCKNDPEGIKDLIQQHVKLQKQIEDLQGRTANKNPIKAFYENRAYTPRSLSAPVFSTSLNFVEKERDFRKINHEMANGGNQNLKVMDEALMVDDCDCHPEFSPPSSQPPKHKGKQKSRNNESEKFSSSSQLTLPADLKNILEKQFSKSSRGAHQDFANIMTMLRSLIQDGYTALLEQRCRSAAHAFTELLNGLDPQKIKQLNLAMINYVLVVYGLAISLLGIGQPEELSEAENQFKRIIEHYHNEGLDCLAYCGIGKVYLKKNRFLEALNHFEKARTLIYRLPGVLTWPTSNVIIEESQPEKIKMLLEKFVEECKFPPVPDAICCYQKCCGYSKIQIYITDPDFKGFIRISCCQYCKIEFHMNCWKKLKTTTFNDKIDKDFLQGICLTPDCEGVISKIIIFSSGGQVKCEFEHKVIKEKVPPRPILKQKCSSLEKLRLKEDKKLKRKIQKKEAKKLAQERMEEDLRESNPPKNEEQKETVDNVQHCQFLDDRILQCIKQYADKIKSGIWNTATLLKELLSWKVLSTEDYTTCFSSRNFLNEAVDYVIRHLIQEKNRVKTRIFLHVLSELKEVEPKLAAWIRKLNSFGLDATGPFFSRYEASLKQLDFSIMTFLWNEKYGHKLDSIEGKQLDYFFEPTSSKEARCLIWLLEEHRDKFPALHSALDEFFDIMDSRCTVLRKQDSGEAPFSSTKVKNKGKKKKPKDSKPMLVGSGTTSVTPNNEIITSSEDHSNQNSDTAGPFAVPDHLRQDVEEFEALYDQHSNEYVVRNKKLWDMNPKQKCSTLYDYFSQLLEEHGPLDMSHKMFSEEYEFFPEETRPILEKAGGLKSFLLGCPRFVVIDNCIALKKVASRLKKKRKKKNIKTKVEDISKAGEYLQVKLPLNSAAREFKPDVKSKPVSGSSSAPASEDVKPKPLSANSPKPACEDVKAKPVSDNSSRQVSEDGKPKGFSSNSPKPGSEDANYKRVSSNSPKPVLEDVKPTYWAQSHLVTGYCTYLPFQRFDNTRTSPAYINVLPGLPQYTSIYTPLVSLSPEYQLPRSVPVVPSFVANDRADKNATAYFEGHHLNAENAAGHQIASETQILEDSSLISVKSQCSTGDAHTVLSESNRKDGHCGNSNNKCEVIPESTSAVTNIPQVQMVAIQVSWNITHQEVNTEPYNPFEKQQGEISRIEKEYQVLQDQLKEAYENYEQIKLKGLEETRDLEEKLKRHLEENKISKTELDWLLQDLEREIKKWQEEKKEIQKTLKSLKKKIKKVSNANEMYTQKNDGNDKEHELHLDQSLEISNTLTNEKMKIEECIKKGKKDYEESHQRAVAAEVSVLENWKESEVYKLQIMQSQAEAYLKKLELISHDPAAYPDMESDICSWELFLSNVTKETEKAKYQFEEQIKAIKNGSRLSELSKVQISELSFPACNTVHPELLPESSGHDDQGFMTSASDVTGNQAALHRDPSVFSAGDSPGEAPSALLPGPPPSQPEATQLPGPKGAGQAALSEQSPAADQKQPVPPGCAACSSQSPKKPFNSIIEHLSVVFPCYNSTELAGFIKKVRSKNKNSLSGLSIDEIVQRVTEHILDEQKKKKPNPGKDKRTYEPSSAAHVTRSSQGPPLAVVAPSPKTKGQKAEDVPVRVALGASSCEICHEVFKSKNVRVLKCGHKYHKGCFKQWLKGQSACPACQTCDLLSEE

SEQ ID NO: 27476 - protein, 87 aa, Homo sapiens
VVTLLKEAIHWREEFDLDVIAVVNDTVRTMMTCGFEDPHCEVGLIGWHGQQCLLHGRDEQCGTGGRRRGADVCEHGMGGLWRQWMPR

SEQ ID NO: 27477 - protein, 492 aa, Homo sapiens
LFDHIVEWLANFMDKLQIKDKKLPLGFTFSFPCRQTKLDESFLVSWTKGFKSSGVEGRDVVALIRKAIQRRGDFDIDIVAVVNDTVGTMMTCGYDDHNCEIGLIVGTGSNACYMEEMRHIEMVEGDEGQMCINMEWGAFGDDGSLNDIRTEFDQEIDMGSLNLGKQLFEKVISGMYMGELMRFILVKMAKEELLFRGKLSPELLNTGHFETKDISDTEGEKDGIRKAREVLMRLGMDPTQEDCVATHRICQIVSTHSASLCTATLAPVLQRIKENKGEEQLRSTIGVDGSVYKKHPHFAKRLHKTVWRLVPDCYVCFLRSEDGSGKGAAMVTAVAYRLADQHRARQKTLEPLQLSHDQLLEVKRRMKVEMERGLSKETHASAPVKMLPTYVCATPDGTEKGDFLALDLGGTNFRVLLVCIRNGKWSGVEMHNKIYGIPQEVMHGTGDELFDHIVQCIEDFLEYMGMKGVSLPLGFTFSFPCQQNSLDESILL

SEQ ID NO: 27478 - protein, 273 aa, Homo sapiens [sequence omitted]

SEQ ID NO: 27479 - protein, 186 aa, Homo sapiens
LVGSLLFFFQGDHFTVEEMRLTEKSEGEQQLKPNNSNAPNEDQEEEIQQSEQHTPARQRTQRADTQPSRCRLPSRRTPTTSSDRTINLLEVLPWPTEWIFNPYRLPALFELYPEFLLVFKEAFHDISHCLKAQMEKIGLPIILHLFALSTLYFYKFFLPTILSLSFFILLVLLLLLFIIVFILIFF

SEQ ID NO: 27480 - protein, 181 aa, Homo sapiens
MRRVTLFLKGSPKNGKVVAVYGTLSDLLSVASSKLGIKATSVYNGKGGLIDDIALIRDDDVLFVCEGESFIDPQTDSKPPEGLLGFHTDWLTLNVGGRYFTTTRSTLVNKEPDSMLAHMFKDKSVWGNKQYHRGAFLIDRSPEYFEPILNSLRHGQLIVNDGINLLGVLEEARFFGIVSLI

SEQ ID NO: 27481 - protein, 735 aa, Homo sapiens
LGSRPPPSAAPPHPGEVRRRLCRCGRSSSAPIPGKPGTGTFENNCSGIRVRVRALRLRQDRVKWSGRAEGAKVRVLVPRSRREPRLRRATPSLALGAQHPADKRRDARTRRARSLVEEEDQHMKLSLGGSEMGLSSHLQSSKAGPTRIFTSNTHSSVVLQGFDQLRLEGLLCDVTLMPGDTDDAFPVHRVMMASASDYFKAMFTGGMKEQDLMCIKLHGVSKVGLRKIIDFIYTAKLSLNMDNLQDTLEAASFLQILPVLDFCKVFLISGVTLDNCVEVGRIANTYNLTEVDKYVNSFVLKNFPALLSTGEFLKLPFERLAFVLSSNSLKHCTELELFKATCRWLRLEEPRMDFAAKLMKNIRFPLMTPQELINYVQTVDFMRTDNTCVNLLLEASNYQMMPYMQPVMQSDRTAIRSDTTHLVTLGGVLRQQLVVSKELRMYDEKAHEWKSLAPMDAPRYQHGIAVIGNFLYVVGGQSNYDTKGKTAVDTVFRFDPRYNKWMQVASLNEKRTFFHLSALKGYLYAVGGRNAAGELPTVECYNPRTNEWTYVAKMSEPHYGHAGTVYGGVMYISGGITHDTFQKELMCFDPDTDKWIQKAPMTTVRGLHCMCTVGERLYVIGGNHFRGTSDYDDVLSCEYYSPILDQWTPIAAMLRGQSDVGVAVFENKIYVVGGYSWNNRCMVEIVQKYDPDKDEWHKVFDLPESLGGIRACTLTVFPPEETTPSPSRESPLSAP

SEQ ID NO: 27482 - protein, 313 aa, Homo sapiens
LQGGCAGGGGGGPGVRGTPFTRARAHGAGARTHGRTHTHARTHTRTELARLERTNVDVLFVWSPQGGLGPRFGPGEMAQPILGHGSLQPASAAGLASLELDSSLDQYVQIRIFKIIVIGDSNVGKTCLTFRFCGGTFPDKTEATIGVDFREKTVEIEGEKIKVQVWDTAGQERFRKSMVEHYYRNVHAVVFVYDVTKMTSFTNLKMWIQECNGHAVPPLVPKVLVGNKCDLREQIQVPSNLALKFADAHNMLLFETSAKDPKESQNVESIFMCLACRLKAQKSLLYRDAERQQGKVQKLEFPQEANSKTSCPC

SEQ ID NO: 27483 - protein, 181 aa, Homo sapiens
MYTIINGPSKLVAQRRTGLTQQQVKGQLQELLKSRQPAPPTLQPQRAQPFAQPLGPWPLSSAGPRLVFNRVNRRRDPSKSPSLQGTQETYTLAHKENVRFVSEAWQQRLRCQYVLQAALLLGPSYSPASAFQEAETTRTQDCTWLANTIANKKILHGSLRSVPNTTRQFDIIIEHCRNNAE

SEQ ID NO: 27484 - protein, 114 aa, Homo sapiens
LLDALLPPPPNWKRAPRLRRRLRPPTGPAGSPTSLQNRTPVPPWQLGFPQLQLFSSAPASCRIFNFCAPPVKLNQPTKSRASPLEAASYFTLFSHFLKMLNSWWTAEERDSVFS

SEQ ID NO: 27485 - protein, 62 aa, Homo sapiens
LLPSSPLAGQLCALQTNFLMRYFASSFNIEARLQLKGSRKLHLKLFFLLFFKIVVYMIGICI

SEQ ID NO: 27486 - protein, 82 aa, Homo sapiens
VALSLLTSQGRQRRAGPSTAFAALPATVATFSAMTESESLRTSRHADTALARVRRGAKFRGQARTRYCARARSHRFTPPSGA

SEQ ID NO: 27487 - protein, 44 aa, Homo sapiens
LVPPASGPPPFVRCVEAVSGAAAALRRWAGKRDGLKMAAPTIVV

SEQ ID NO: 27488 - protein, 118 aa, Homo sapiens
LDGAGAMGKRVRWGPLVPVPRKPARWNWHLSGPDRAGGCTGSERNRSVQAPVLDGQLGPGILTLHPGSERENCGVCSAKPGQLSRQPPPPSRSPSLPQRTPGHGPSCSRHSSHRLNLC

SEQ ID NO: 27489 - protein, 213 aa, Homo sapiens
VGAAPEVGIPPPNRRATCGGLRGCGSSRRWARPPPEAAAGSRAAAGSAPPVPPSPPYPSSPARPPFPTPGPAEAARVSRVSPPAARWGRGRGRGRRCDPQRWKRELQLGRARGWGVPANPALPEGPSLAGSGAFLSGARPPCSAQLGVRSREEPPHPPSRPAGPSRQVVAGEVGAGRPLSVSPLATTRRDLGDSVDPTTGDHETQAVSPRPAA

SEQ ID NO: 27490 - protein, 246 aa, Homo sapiens
LAAPLASPSWGLCHPGGPGPDLRRLPLGLEAGHEGADGSVVSPERTLLSCGLAEPAHRPSDSWLTQPRPEAPREGQARLCRNLPMGLGTWPSRKACLRGAALHRGLDPPLGTRSEEGEALGRRHRSGGAQQSPCPAWEEASAQLMSRCVGSQTVTWHGHPGPKAESLQKSQPRWTARCTCQPRRSPPRCRSPHPPHPCGENSAGFPVVGFVTLKAEAADWELNPRGRRSTHWKPSSCCCSQQFFFL

SEQ ID NO: 27491 - protein, 125 aa, Homo sapiens
LLFRHRTLVFLRNRKTVAQRKRKSFEEGARRGQWGSAPAQPLLHRVGGKGCRGSRRGEGRGVPGLAGVCPGPAAQPQMPRPALAEEPGCAPVTTRVRGASGARVVPRAHVCRARSPQRVPRGARV

SEQ ID NO: 27492 - protein, 134 aa, Homo sapiens
MPGDRHALPLIIPPFWHLTSRERRSRAGKRTKNILREPEATEDLCGVTGRQKQAGRGGRNHIYSVLTTATPLPSTMPDTSWEAKNYLLKEQINEGIKCNPLRAWPFRLLLEVNLSMSHIHRNIHLIPRDHQKTS

SEQ ID NO: 27493 - protein, 107 aa, Homo sapiens
LIPHRLQPANKVNNQCCSCSPAHPAPLALCGRNHIYSVLTTATPLPSTMPDTSWEAKNYLLKEQINEGIKCNPLRAWPFRLLLEVNLSMSHIHRNIHLIPRDHQKTS

SEQ ID NO: 27494 - protein, 103 aa, Homo sapiens
VNPRGGSLRGHVGETRQIRWREQDAGWRGPPTPAPAALQRTQTHCWKEPPARPMAPILHTQMLRPSVSKWLHQGHSASRWPRRDSKFHHVTPGPSCSHACSQP

SEQ ID NO: 27495 - protein, 94 aa, Homo sapiens
MKKKRANGELYVREFYGSYWSAGVCCRSTPDPVCLDITSRSYRTAKIAALSFLWKLCLTWAPTRCQPELSHMRCLSTPSGRCLPIRRHRGQVPT

SEQ ID NO: 27496 - protein, 107 aa, Homo sapiens
VDRQTGLERLECKETCSLVGTMRTPAAKGGSEESLNSLRTYCRLPFGKCSWSCALGGVPGRAVWPGNGGEAPALSSCILTYNWESPVFLLPQPSVPCFEPGKMAHHP

SEQ ID NO: 27497 - protein, 53 aa, Homo sapiens
VDRQTGLERLQPWLPSGRLDHECFKGKAMSDSIPHPQHVKQRLAEQRTHPSIE

SEQ ID NO: 27498 - protein, 10 aa, Homo sapiens
LTMKLVTQEL

SEQ ID NO: 27499 - protein, 91 aa, Homo sapiens
LFLGGIGSDIINIYTAAPEDSLCKCFSPINQHFREEKKTNRDFFLPFTQPDSTETDQDPDCIDMPPMSGVTPGSPFQVELEETTWTHVEWF

SEQ ID NO: 27500 - protein, 116 aa, Homo sapiens
LAHMTEKCSRASHHPRSSESGDPNSTFRAHSVTSLHCPQLASAGQPLCPWRQASSMRQILEYLHYPKGIIQAFLTFSTISLHRAENKQNNTAALPGGQGSRRAKRPKTPSSGKPQL

SEQ ID NO: 27501 - protein, 9 aa, Homo sapiens
MFSDMTRRL

SEQ ID NO: 27502 - protein, 53 aa, Homo sapiens
LGGEKRGPRGVGPIGYRRLGSKEEKVWSVACLRGAKWFLTGVRRAWWGARLVR

SEQ ID NO: 27503 - protein, 370 aa, Homo sapiens
LPGCPRLAGHLGRAIGFRRPSLLAPVCTGWARPGVEEAQARGASARSHSFLPSALGGVPGAADPTEVFSLALGTSTGPVGASQGPASAARLTQRGSPEPREPDLRTSYSRASASAGPAALQPQGAVTPGPSANLAAPGGTLVPAEGPRMPPVTAQSASSHPAPSASQPSSPAAASRGSLSVPQEVTATLLASASSPTLDATRDAPATPRIAAPPGSATSSRGLGSQAQGSSLGTKESISDSFGLGSPAVTQRTTAPPDSAALSQDTRPEAAGSWPGPQTAVASVGSGTDRRDTAAATEAQHLSSESKEKTSAQKSGHPFGILKADFTISTLMDPEEMKDQFLRQIQEVLKLTLGHEQFRLKWVSFEVNKK

SEQ ID NO: 27504 - protein, 356 aa, Homo sapiens
LPGCPRLAGHLGRAIGFRRPSLLAPVCTGWARPGVEEAQARGASARSHSFLPSALGGVPGAADPTEVFSLALGTSTGPVGASQGPASAARLTQRGSPEPREPDLRTSYSRASASAGPAALQPQGAVTPGPSANLAAPGGTLVPAEGPRMPPVTAQSASSHPAPSASQPSSPAAASRGSLSVPQEVTATLLASASSPTLDATRDAPATPRIAAPPGSATSSRGLGSQAQGSSLGTKESISDSFGLGSPAVTQRTTAPPDSAALSQDTRPEAAGSWPGPQTAVASVGSGTDRRDTAAATEAQHLSSESKEKTSAQKSGHPFGILKADFTISTLMDPEEMKDQFLRQVRLLHTLLILIR

SEQ ID NO: 27505 - protein, 344 aa, Homo sapiens
LPGCPRLAGHLGRAIGFRRPSLLAPVCTGWARPGVEEAQARGASARSHSFLPSALGGVPGAADPTEVFSLALGTSTGPVGASQGPASAARLTQRGSPEPREPDLRTSYSRASASAGPAALQPQGAVTPGPSANLAAPGGTLVPAEGPRMPPVTAQSASSHPAPSASQPSSPAAASRGSLSVPQEVTATLLASASSPTLDATRDAPATPRIAAPPGSATSSRGLGSQAQGSSLGTKESISDSFGLGSPAVTQRTTAPPDSAALSQDTRPEAAGSWPGPQTAVASVGSGTDRRDTAAATEAQHLSSESKEKTSAQKSGHPFGILKADFTISTLMDPEEMKDQFLRQ

SEQ ID NO: 27506 - protein, 104 aa, Homo sapiens
VVKQRYWSQKIYHPYISTGSIRGHAPFSKPRKMKTWDPGNRRADRRVVKEISRTQVKGDPRKTAVPQALRATSPDWCKLEATGNKRKIKTLREKVSCGRKVKST

SEQ ID NO: 27507 - protein, 78 aa, Homo sapiens
MILSGHIPEAGGKKNSISEANECQSLEDGNLNRKSTVTYYCPSEKKEEVHVTDGKSVNQRQSEVYSMNDLFFWYNPVH

SEQ ID NO: 27508 - protein, 116 aa, Homo sapiens
LSSLSPACAPVEDIQPPTALGRMEMPRCRGQSPCAKRGLRPRRPLVSSSGFLKPRPCLWRKKAELQLRERWACWPRWRHPNAWSLMGLWQVKKKESAVNLQVNSGLSIQGIFHSCL

SEQ ID NO: 27509 - protein, 114 aa, Homo sapiens
LSSLSPACAPVEDIQPPTALGRMEMPRCRGQSPCAKRGLRPRRPLVSSSGFLKPRPCLWRKKAELQLRERVQFEARFCRILRWHHEHLLSPLAVTAPPPPSILDEPVKMVLPQK

SEQ ID NO: 27510 - protein, 120 aa, Homo sapiens
LSSLSPACAPVEDIQPPTALGRMEMPRCRGQSPCAKRGLRPRRPLVSSSGFLKPRPCLWRKKAELQLRERWACWPRWRHPNAWSLMSSVRGQVLQNPEVASRASPQSLGRDSSSSTLHPG

SEQ ID NO: 27511 - protein, 137 aa, Homo sapiens
LSSLSPACAPVEDIQPPTALGRMEMPRCRGQSPCAKRGLRPRRPLVSSSGFLKPRPCLWRKKAELQLRERWACWPRWRHPNAWSLMGRFQGLLESAAALPPWESSVRGQVLQNPEVASRASPQSLGRDSSSSTLHPG

SEQ ID NO: 27512 - protein, 105 aa, Homo sapiens
LSSLSPACAPVEDIQPPTALGRMEMPRCRGQSPCAKRGLRPRRPLVSSSGFLKPRPCLWRKKAELQLRERWACWPRWRHPNAWSLMVGSAIAASSWMFRNSPALE

SEQ ID NO: 27513 - protein, 294 aa, Homo sapiens
LEEMMRDFQIMESGPSVHGPSAPAVHTTLSREEGIYSTPPTAGTVQIPTSTAQHPLQEQHSFPHLQCSTHCRKSADSHIYSAAPTAGTAQIPTSTAQHPLQEERRFPHLQNSTHCRNSADSHIYSSAPTAGTAQIPSSTARHPLQEQHRFPHLQYGTHCRNSADSHIYSTAPTAGTAQIPTSTVRHPLQEQCRFPHLQYGTHCRNSADSLIYSTAPTEGQCRFPHLQHSTHCRNSTDSHIYSAAPTAGTVQIPTSTAQHTLQEQCSFPCVAQHMQSPLHGSHLHNAGVANGLCF

SEQ ID NO: 27514 - protein, 88 aa, Homo sapiens
LDPFQVPVKPGDMALGKSVALSASVSSTVAGGNSETRLNVVVRRVGGGGCGESAKNSVCGAAEVFCIMSPRLVLFLPQKIRWRLTEGF

SEQ ID NO: 27515 - protein, 82 aa, Homo sapiens
MLSTAQNISDRKSCASPSFPSKTSMHAIARIPRHRTEPGLPATKAAMGSYSFSSSSVAPFSPQGRLSPGEEPGWLRCGSRGP

SEQ ID NO: 27516 - protein, 122 aa, Homo sapiens
LERRLFYSETPLQLFFFFGNCLFCFPFNIRSFLLYKSSFCSKSGCKQRCYHKDRKQRPHWCSAGLQALPGFIVGEATRPAPSQRDVTHAAGCHPQNSRETLGAPGQEEADVNFNSGDFKRNF

SEQ ID NO: 27517 - protein, 116 aa, Homo sapiens
LLARLACSSAIIAHYSLDLWGSGDPPTSASCIAGTTAGMCHCTQLILFFLEMGSHRVAQAGFKLLGSSDSPTLVSQGAGITGVNHCTLWFLGQCNYLTHLAVNSWSILFGPMLKQP

SEQ ID NO: 27518 - protein, 46 aa, Homo sapiens
VTERMACDWIVSLFLPPGSPSAGISLPPDPWSVRVQVKRVISLPQS

SEQ ID NO: 27519 - protein, 161 aa, Homo sapiens
LEKAPDQRTQPAGRRAALRPAWAPGTAAGAASYLVKFVLPSAWTQAPVAAREGTGLARLLARPPLPARSPPAASLARPLRSSGSHYSSFQYGILSVRMLGALFFFFFFFFLRFCVCVYVCACACSELLQRPFPALAKFLKPISLRDVIGSFPSQLRAIPCA

SEQ ID NO: 27520 - protein, 126 aa, Homo sapiens
LPGRPSSEMWGAPLPRRPVWDVRSASARSRPRLGTEECLCPTVTPSGRNSTGKKSKSPGTVSLISGCDPATHFILPNPHRCWHFPTQLMSSYFPCSIYTPYISSGATNKFQTLLDRGRSRRNKKYY

SEQ ID NO: 27521 - protein, 200 aa, Homo sapiens
LSPFHLIPFDSNPFHSILFHTIPFYSIPFHCIPTHSFPFHSIRFHSIPFHCIRVHSFLFHSITLNSIRVHSIPFQSIRIHSIPFHLSLIHSIPFHLGPFQSIPFEYIPFNYIVSHSNLFHFISFHSIPVHFIDFHSIPSHSIPFHWSPFVSIPLHSNPFHSITLNSSPFHSMPLYSSTFHTIPLHSIPFHSNWAHSIKFH

SEQ ID NO: 27522 - protein, 34 aa, Homo sapiens
LRFDNFFFQKKRTAKAKTTKEKHKQVEIYFKNQS

SEQ ID NO: 27523 - protein, 54 aa, Homo sapiens
LVVVFICFKPSPWVQMQPCFWMPFGVATLRTRDKKPEEKVTMKETERLNSMRDL

SEQ ID NO: 27524 - protein, 89 aa, Homo sapiens
LALHQRPLGFSGGDRGALGAGRLLQEAKRRPQGWPGTAWNQLEDVSRTEERATTSVRKGGKRAERGERPRWEAEAGSQRAGGWETMARA

SEQ ID NO: 27525 - protein, 193 aa, Homo sapiens
LPGRTQEPSLWVGFLVSADRLLVSRSSSIRKPGIFILPRSSMLPSPPVFRDFALPQAPAHLSHRWALVAPQEERGAAGARSRSAGTDSTLGVWAACHEEQRSHRSRFRRRPDTEDPERRAAPPRNALTGAKFSHPGSEGGGEGSPWLQVEVELQAPRTLPAVYCVFTGDSSKCPGEERDSCSVHFSLYIGTLV

SEQ ID NO: 27526 - protein, 137 aa, Homo sapiens
VGFLVSADRLLVSRSSSIRKPGIFILPRSSMLPSPPVFRDFALPQAPAHLSHRWALVAPQEERGAAGARSRSAGTDSTLGVWAACHEEQRSHRSRFRRRPDTEDPERRAAPPRNALTGAKFSHPGSEGGGEGSGTRG

SEQ ID NO: 27527 - protein, 66 aa, Homo sapiens
LFLTSLGPSFLESHPVHQYPLTLFGFVGVHSSRKGGLWSLYRLGRRQSTKICGPGIQYESVKNILS

SEQ ID NO: 27528 - protein, 170 aa, Homo sapiens [sequence omitted]

SEQ ID NO: 27529 - protein, 90 aa, Homo sapiens
MASNRAISLIAWPKVPFLGIREAKNPRSENKRLAAILGAARPILGVACHHLGNSKNKDPPVTFGGPYGASPKRYILGRTLPSHFIYPNHG

SEQ ID NO: 27530 - protein, 30 aa, Homo sapiens
LHPCSQVAHPTVFLSLVPPTEDPPHRKKTV

SEQ ID NO: 27531 - protein, 89 aa, Homo sapiens
LLLLTLWVHTAFTSCNTYREGLQLHSLSQRDQEPTGRKNNSRRASLRAVTLTMKVCSFTPEPGRPRTHRKEETPNTSEHQKEQTPEAPP

SEQ ID NO: 27532 - protein, 148 aa, Homo sapiens
LHGIPAQGCMVIYRCTSWQRDLQVASSPFSRQAVPQDRVLLCHPGWSTMYNGVIIADCSLDLLGLSHPPALASCVAGTTGTHHRAQLAVVILSALSACPSWRLCQVPGPHTVNRAVSPQAHQPLVSTYFDFCPSERQKLNKTKEFGCS

SEQ ID NO: 27533 - protein, 110 aa, Homo sapiens
LSDPPNVHHLCPFVKHRDCFRLRPHSRHCSCGHPWKCVLRFLQGPDMQGSSRMLKEQRNQRTRQTNPVCWYRVIYLGDLTDKLGLGQPRDKQISVPVILEPRLMYHRERV

SEQ ID NO: 27534 - protein, 228 aa, Homo sapiens [sequence omitted]

SEQ ID NO: 27535 - protein, 248 aa, Homo sapiens [sequence omitted]

SEQ ID NO: 27536 - protein, 68 aa, Homo sapiens
LTEQETCLFPGVITIYLSVYCSTMSDIQSKIKTHKKRQETNNPLSRDKVINKSRCRHDPYVGTIIRGL

SEQ ID NO: 27537 - protein, 127 aa, Homo sapiens
LGLQAPCPGRFRTMQTSAYMQGTSPKCSKNLQPVSSLETFRPAMEDSPAFPRKGLTIVRVWFHHVGQACLQLLTSDPPTSASQSVGITDVSTATCRKCLFFISKCGLEVIHVQYMLIKNRAKLFPKV

SEQ ID NO: 27538 - protein, 195 aa, Homo sapiens
LNLKKVLQHFWCTTWGFEKRFSGQIKPSKMNLTQSLEDRKTYKSTACSILIQKEQQGKRPEEGAYCGFQNTIEEERGRFRTMQTSAYMQGTSPKCSKNLQPVSSLETFRPAMEDSPAFPRKGLTIVRVWFHHVGQACLQLLTSDPPTSASQSVGITDVSTATCRKCLFFISKCGLEVIHVQYMLIKNRAKLFPKV

SEQ ID NO: 27539 - protein, 167 aa, Homo sapiens
LNLKKVLQHFWCTTWGFEKRFSGQIKPSKMNLTQSLEDRKTYKSTACSILIQKEQQGKRPEEGAYCGFQNTIEEERDGGSLHHQGGVQWRDLSSLRAPPPGFKRFSCLSLPSSWDYRRHAQGDSEPCKLLPICREPHQNAVKTFSQSPLSRLLDLLWRTLLLSPEKA

SEQ ID NO: 27540 - protein, 88 aa, Homo sapiens
LDLTKVSLRMFCSEQGLKNMIFSTVDCSLVFRTLPPAEKIDEGNTGGGIRAVSCLGWLKTNLEEHDVTTSTEIKRRHQSEGPVGTVEQ

SEQ ID NO: 27541 - protein, 93 aa, Homo sapiens
LGGPGWWLRLGTLQLKMTLQGLKNMIFSTVDCSLVFRTLPPAEKIDEGNTGGGIRAVSCLGWLKTNLEEHDVTTSTEIKRRHQSEGPVGTVEQ

SEQ ID NO: 27542 - protein, 108 aa, Homo sapiens
LTPASKCVCVCVCVCVCVCALAVIYDLQWPVCGFGFHCGVENVVCLPSAYVCLGLCVHPSSPALVLRQTKEEGLRTFLASKAPLQACCPTHPAIPRPACIVVCTFICS

SEQ ID NO: 27543 - protein, 52 aa, Homo sapiens
LRAQKAAEASLGPLLSCPWALPWLLSFPTAQPKESPLQLTRVQPPEQRVPQP

SEQ ID NO: 27544 - protein, 95 aa, Homo sapiens
VEFRAPEVSSFPLPVRLRGRGRVGKRSRWVMRHVRRGGTVVPGPTPRLPKSLRKGMRWACDLATRRVRSPSRGNHGKRMKEGGEPGTASWRNKLS

SEQ ID NO: 27545 - protein, 83 aa, Homo sapiens
MILSLVAPEKHQHLMASPSRLQSQRAILCGKRRAGSWRTSGAPGMDQCLHQKRKPVSNGGAGGFLEGGGLIQDHQGTADCSRS

SEQ ID NO: 27546 - protein, 77 aa, Homo sapiens
LVFQTAPQMASPSRLQSQRAILCGKRRAGSWRTSGAPGMDQCLHQKRKPVSNGGAGGFLEGGGLIQDHQGTADCSRS

SEQ ID NO: 27547 - protein, 40 aa, Homo sapiens
MNTELLQIHGSSFPETTLRSMTSFQLEKGLHSVGEMNKQH

SEQ ID NO: 27548 - protein, 61 aa, Homo sapiens
LGSSNPPALGSQSAGVTGMSHVPSLSYIFNTHSFFKTTLRSMTSFQLEKGLHSVGEMNKQH

SEQ ID NO: 27549 - protein, 43 aa, Homo sapiens
LGSSNAPPLTSQNAGITETTLRSMTSFQLEKGLHSVGEMNKQH

SEQ ID NO: 27550 - protein, 93 aa, Homo sapiens
MLCSSLLFSKRGHQVSQQITFVDYKRKVTCSSKILNSLLHVLCFINKHNWYSEKKSAISAYFRMLVCCLPNIMLIHLKWNCQRLQNVFTFLEN

SEQ ID NO: 27551 - protein, 79 aa, Homo sapiens
MLCSSLLFSKRGHQVSQQITFVDYKRKVTCSSKILNSLLHVLCFINKHNWYSEKKSAISAYFRMLISLRTSKHQYHQPE

SEQ ID NO: 27552 - protein, 85 aa, Homo sapiens
LFSKRGHQVSQQITFVDYKRKVTCSSKILNSLLHVLCFINKHNWYSEKKSAISAYFRMLVFQPTWLTHLSSARQLCVEDDLTPDK

SEQ ID NO: 27553 - protein, 43 aa, Homo sapiens
LMHTVEADLTLSPLYNQNVSLEATSHHPLAIGTWASHLFCSPL

SEQ ID NO: 27554 - protein, 111 aa, Homo sapiens
LPSFFSFLQISPWGTGLEQSNKYLLIPLTEESWNFFFPSEYPRPQVHVATQSYTLVHQDEDSSFLSLWIFQMKKLRLRREEKNKRKNCPRSPRHLDSHMLSYFCLWGSCNT

SEQ ID NO: 27555 - protein, 916 aa, Homo sapiens
LGMASFFSTLTFPSLKASWGCKAKNHELLCGLSHGSSGRQMSGLPVSQSGPSSGSGGQTSGLTVSQSGPSSGSGGQTSGLTVSQVALPPAPEDRRPAHGVTEWPFLRLWRTDVRAHGVTSGPSSGSGGQTSGSRCHRVALPPALEDRRPGSRCHRGALPPALEDRRPGSRCHRGALPPALEDRRPGSRCHRVALPPALEDRRPGSRCQQRVPSSGSGGQTSGLAVSQRGPSSGSGGQTSELAVSAEWPFLRLWRTDVRARGVSRVALPPPLEDRRPGSRCQQSGPSSASGGQTSGLAVSAEWPFLRLWRTDVRARGVSRVALPPALEDRRPGSRCHRGALPPALEDRRPGSRCHRGALPPALEDRRPGSRCQQRGPSSGSGGQTSGLAVSAEWPFLRLWRTHVRARGVTEWPFLCLWRTDVRDRGVTEWPFLRLWRTDVRDPGVSRVALPPALEDRRPGSRCHRGALPPALEDRRPGSRCQQRGPSSGSGGQTSGIAVSAEWPFLRLWRTDVRARCVTEWPFLRLWRTDVRAPGVSRVALPPPLEDRCPGSRCHRVALPPALEDRLPGSRCHRVALPPALEDRRPGSRCQQSGPSSGSGGQTSGLAVSQSGPSSGSGAQTSGIAVSAEWPFLRLWRTDVRARGVTEWPFLRLWRTDVRARGVTEWPFLRLWRTDVRDRGVSRVALPPALEDRRPGSRCHRVALPPALEDRRPGSRCQQSGPSSGSGGQTSGLAVSQSGPSSGSGGQTSGLAVSAEWPFLRLWRTDVRARGVTEWPFLRLWRTDVRARGVSRVALPPALEDRSLGSRCHRVALPPALEDRSLGSRCQQSGPSSGSGGQTSGLAVSQSGPSSGSGRQTSGITVSAEWPFLWLWRTDVWDHGVSRGALPLEPLVGNLLVASFGFWWLVFLFSFFIFFFF

SEQ ID NO: 27556 - protein, 109 aa, Homo sapiens
LSCSGGHLPEDRSPGCRSRWWRRGEAAPLPLWFCMGQGPCCSGRGKKVGFLDMGNTQQHLALPQRRCAMFTLIFGFLKKTCKSCKTRTMRTPQGHTVLEAENQDQDAGV

SEQ ID NO: 27557 - protein, 121 aa, Homo sapiens
LCKRVSQVLSIKEKSLKESVSATPVDTRLGRKRKGCCQCGKRGGGRIEDQTSHDVSSSHSRIQTKAVTLLNSVEAERGEEAPEEKLAAGRGGFLRFRDRSHLHHTEVQVRQHVQLPDGRSS

SEQ ID NO: 27558 - protein, 66 aa, Homo sapiens
LTSTFPVQTCASILPHSIWLKLLLHFLLGCDHSGSPTVHQSQHLKGEKIFFCLVFFKILMMDSHQG

SEQ ID NO: 27559 - protein, 150 aa, Homo sapiens
LKTELRQCGVKGRGWTSESGLGSNTGHTAYQPCDPGEKMAIPPNVWPPPAKAKTFVGFFLYCLNKEEFVHSLSGSGFHPMAMWELQDLISGLTCASILPHSIWLKLLLHFLLGCDHSGSPTVHQSQHLKGEKIFFCLVFFKILMMDSHQG

SEQ ID NO: 27560 - protein, 117 aa, Homo sapiens
LLREKMAIPPNVWPPPAKAKTFVGFFLYCLNKEEFVHSLSGSGFHPMAMWELQDLISGLTCASILPHSIWLKLLLHFLLGCDHSGSPTVHQSQHLKGEKIFFCLVFFKILMMDSHQG

SEQ ID NO: 27561 - protein, 49 aa, Homo sapiens
LAPSCKGQNIRWTCASILPHSIWLKLLLHFLLGCDHSGSPTVHQSQHLK

SEQ ID NO: 27562 - protein, 96 aa, Homo sapiens
LLREKMAIPPNVWPPPAKAKTFVGFFLYCLNKEEFVHSLSGSGFHPMAMWELQDLISGLTCASILPHSIWLKLLLHFLLGCDHSGSPTVHQSQHLK

SEQ ID NO: 27563 - protein, 50 aa, Homo sapiens
MAQQRGCCPGGLRERNWAISREWGSTQKEEPTGDTRNPSRKKSEMEEGKS

SEQ ID NO: 27564 - protein, 69 aa, Homo sapiens
LEETCVRKLQWQLPSGGVSEKLRRFHLRKSSAFRQRLCQIMLPNHNLAFPPYCCSDVGGPKGSRRAKEE

SEQ ID NO: 27565 - protein, 120 aa, Homo sapiens
LLRHAGLQVPSPSRWEEAEAWQELERCAGRPEVLADPAHPPQLLAQVLSFSLPGASIVSCLLGMRGQPSPHPPGTRAGQRAPARGPGSTRASLSKPPGKQREPAPASASPERGFHSAAVS

SEQ ID NO: 27566 - protein, 111 aa, Homo sapiens
MTDLSQSPMHRFPVKGKSWSHGGERIYNHVFTDREKEARGSTGKNSFFLSRSLTAPRLECSGAISAHCNLRLLGSSDSLASASRVAGITGPCHHAQLIFVFLVETGFHYVG

SEQ ID NO: 27567 - protein, 105 aa, Homo sapiens
LESCEAKNLRSENMRLATILEVTRRRFGSSLPPSWELWEQGPLVTFWRPRRDIQSEKIQTITNKQERKQARKKTSKQKSETQKAKRILLAHQLIKMNSLRLCVPK

SEQ ID NO: 27568 - protein, 74 aa, Homo sapiens
LESCEAKNLRSENMRLATILEVTRRRFGSSLPPSWELWEQGPLVTFWRPRRDIQSGMRKHSQPVKLEVRWSQSH

SEQ ID NO: 27569 - protein, 60 aa, Homo sapiens
LESCEAKNLRSENMRLATILEVTRRRFGSSLPPSWELWEQGPLVTFWRPRRDIQSGETGE

SEQ ID NO: 27570 - protein, 94 aa, Homo sapiens
LESCEAKNLRSENMRLATILEVTRRRFGSSLPPSWELWEQGPLVTFWRPRRDIQSDHSVLCGHSIHPFQRTQHSRHRIRSTGLCSHRTPNLSVS

SEQ ID NO: 27571 - protein, 104 aa, Homo sapiens
LESCEAKNLRSENMRLATILEVTRRRFGSSLPPSWELWEQGPLVTFWRPRRDIQSGHCRQFILLPQKRLRWWKLMIRKKKARGEVKNRERPVYGAVRIHTTFID

SEQ ID NO: 27572 - protein, 83 aa, Homo sapiens
LESCEAKNLRSENMRLATILEVTRRRFGSSLPPSWELWEQGPLVTFWRPRRDIQSGHCRQFILLPQKRLRWWKLMIRSIKKAD

SEQ ID NO: 27573 - protein, 59 aa, Homo sapiens
LESCEAKNLRSENMRLATILEVTRRRFGSSLPPSWELWEQGPLVTFWRPRRDIQSGLIN

SEQ ID NO: 27574 - protein, 49 aa, Homo sapiens
MIIINEKKEQLKACCFKNENTRKIEIIDLFFVLLCRENGKHWIWQLQSH

SEQ ID NO: 27575 - protein, 129 aa, Homo sapiens
LEHVFFSLPESSRIWKLSTGISPPSSFLEMSWSTAKRIELKNKNISELLTCMEMRMISFSADVCRLLLQGHRYLDAICITASEDQLDVPFSIFLVEFPILGVIFKKEKSSPSSFPLGAGLGSWAVLFLC

SEQ ID NO: 27576 - protein, 36 aa, Homo sapiens
VDMCTKVYVQRGSEITFARAKTLRPMRVFINRRMVK

SEQ ID NO: 27577 - protein, 95 aa, Homo sapiens
MATASGAGLLFLPTPQAPSHPHAQANVSHTGSGGTDPEQQALAPAPSPAFRVNSCTSWNCLRVLPPSDHGQVQVQCFGSDVSGQAQHSSKEIAAS

SEQ ID NO: 27578 - protein, 53 aa, Homo sapiens
MWHTGSISNHSFSPAGLMCSETNLKHSPSSSSSLDQEELLEEQHSTNLHIDLV

SEQ ID NO: 27579 - protein, 132 aa, Homo sapiens
LTCANCLALPSEMNLVPQMEMQKSPVFCVAHAGSRRPELFLFGHLGSSTRMIFLTFYSPHSITFDPNYSRDWIKNKWMWHTGSISNHSFSPAGLMCSETNLKHSPSSSSMVTGFQGKLYQEKQHQKKSCHLS

SEQ ID NO: 27580 - protein, 196 aa, Homo sapiens
LAKEFSPGRQEPKQQQQQKKKKERKSAPPSPRSEERAAGRVWGSGADSRPKAWGPLSPPWLRQRHVAPDGTREEGVFFGFFSCFHNRLLLGPSLPHFFPPKTGGVGIRTATLRWRMRCLNLPEASGEIGISFHEAELASRFRGICGRKPRPQPVIRVEAPQQVAMLLAAHCPGTAKRWKTLSFTITNWSGSTRRDQ

SEQ ID NO: 27581 - protein, 102 aa, Homo sapiens
LCLLLLAQKPSWTLRPQTAPYWRNRCRISPPSNRCVRASWGLLKDAHAQARTRPPTLEYLRLSPKLEFPIFFLALGDFASPSREGSLTSEMILTKEKCSVLQ

SEQ ID NO: 27582 - protein, 51 aa, Homo sapiens
LLTCGCLALSSSACPLLVLPPTGPAHLWLLCSDSLRLSLSPAHLLMLSSVP

SEQ ID NO: 27583 - protein, 63 aa, Homo sapiens
LMLCPGPLSSRSCPLLVLPPTSPCSPEAPEAALPWSPELQGLPPAHPASHLPLFTFSCSALVC

SEQ ID NO: 27584 - protein, 26 aa, Homo sapiens
LSSRRCPLLLLPPPALLTCGCSVLVP

SEQ ID NO: 27585 - protein, 74 aa, Homo sapiens
LCTQHSSPLHSAADHSPAPRQQVPQRHQVALSLAPVPPLSLPLPLGSLASTLLSCCHTHPPCSAPGSPAVLGPG

SEQ ID NO: 27586 - protein, 126 aa, Homo sapiens
LLNPAQLSSAPLSPVQPSSAQPSLAWLNTAQLSQPRPAQLSPVQLSSAQPSPAQPSPTQPSPTQLGLTQLGSAQISLAQLSPAQLNPAQFSPAHPSSAQPSPVQPSPVQLSSAQPSSAQPSSAQLS

SEQ ID NO: 27587 - protein, 133 aa, Homo sapiens
LAQPSPAQLSPAQPSSAQPSSAQLSLTQLSSAQPSPAQVSSAQPSPAQIIPAQLSSARLSPAQPGPAWSRSAQPGPPSPAQLSPAHPGSAQLNPAQPRSAQPSPNQLSPAQVIPAQPSTAYFSSAQLSLGQLS

SEQ ID NO: 27588 - protein, 31 aa, Homo sapiens
VTCFLPPAVGAGDPHAAILTLIHHLLPASLN

SEQ ID NO: 27589 - protein, 169 aa, Homo sapiens
LGRTRRTARQVMGLPSVLVGRVLPWAPKADRGSLALLLGSSRSPFRAPLRCQGRGPGGLESRSPLRAEVLPEAALGSQIAATRAPDPPAKETANLSSLLLLAAGSQERLRNIRRARDTSGHSRRVFTECTLSQGTQRPNNWAPNKDKVLLIHLLLSGTNAHVQRQDRGR

SEQ ID NO: 27590 - protein, 82 aa, Homo sapiens
LKLIVWLESHVQGDGRLRDEAGKVQLSALEKSHQEGCRDPLQVTWEEENSVMGRHPVKWKAELKEDSGKNEILKNPSAISGR

SEQ ID NO: 27591 - protein, 89 aa, Homo sapiens
VSGGGGSIKQGFLEEVAYDLRLDGDLGIRKVQLSALEKSHQEGCRDPLQVTWEEENSVMGRHPVKWKAELKEDSGKNEILKNPSAISGR

SEQ ID NO: 27592 - protein, 70 aa, Homo sapiens
LPDFQPLEYSLVQLSALEKSHQEGCRDPLQVTWEEENSVMGRHPVKWKAELKEDSGKNEILKNPSAISGR

SEQ ID NO: 27593 - protein, 37 aa, Homo sapiens
VEGGVEARYEPVGASPTPQSQRQTVLGRTDARAEIHF

SEQ ID NO: 27594 - protein, 103 aa, Homo sapiens
LHSSLVTERDSVKKKKKKKKKKKEEENKRKENGLCCFPESSPPSPKLFSQVGPFLLRIQVLFMMFLLSGKTPSCSLHSSLLLLPSLLLPGLYQTQAPQEAHPL

SEQ ID NO: 27595 - protein, 157 aa, Homo sapiens
MFPRCQTSSLDGPEVIVFVQSGGTRPGGAESEIPRWGEWGCAQPRTPESVAWRPHRVEFVFGQESGLRSSQETRTGGLQSSPERAAAPHQPPGTRRPFLGPEKRRGHLGENFANFALGAEEAAGRNGAAAAAGRDAQGGPRASAGHPGARRDAQSGA

SEQ ID NO: 27596 - protein, 113 aa, Homo sapiens
LWAGPHCGRDPAHSPQLLARVLSPSLLGPAALPATRSAGPAEPAPTQNSLACECSAQPLFPPARLPPHLRASKGSRLQPRPAQRVPPTVQRRAEGLASQAWPEWTPRLRRRPE

SEQ ID NO: 27597 - protein, 83 aa, Homo sapiens
LINTVRQMTSQIMTLWNPCVWRSSLTFPTENVHFNKEQEIIFCPTKTEEKLFHSNDKRLLKKKSILRFALLFIQFPNKGFLAD

SEQ ID NO: 27598 - protein, 147 aa, Homo sapiens [sequence omitted]

SEQ ID NO: 27599 - protein, 122 aa, Homo sapiens
VWTVTCGPVMHAPVTCGPVTCEPVVWSCRLWACHVWTCHVWTRLKAGCLSQSYAWAGRGMPLHFLSPMALQCCWVAVTDPGQPLLPGRQLELQGRVSRPAQEASSLLPGTCRSYVQPRSLSV

SEQ ID NO: 27600 - protein, 56 aa, Homo sapiens
VPSPYPHKGTNKPDHRSPCETTFPADTEKKEGIAAQGGPAPPGEPGNSRRETRWPH

SEQ ID NO: 27601 - protein, 31 aa, Homo sapiens
LLLRNQLTTPSEARSCEYMMRCSASLPKRVS

SEQ ID NO: 27602 - protein, 86 aa, Homo sapiens
VVLTPAPNHSRFSSESQWQRHIACLDPTGSCRGRKPSTGAGLFSNLHFSLLVSQNSGTRWSVLNHPHWVALRTLGLGLQMLCPISA

SEQ ID NO: 27603 - protein, 79 aa, Homo sapiens
MLPVLEHQTSSSSVLGLGLAPCSSASQWPTVGPCDHISFLFSFIKYRRNISLKTQETLFCINEGLQEIVGRSKMGELEG

SEQ ID NO: 27604 - protein, 178 aa, Homo sapiens
LERRKTRTSLGRTLSSASNYRNHYLHGQKGMDRPHASERSGFHSQRKMSRHPRAHPHQITSKKGLILFSLFFPTEGHLVIYVTQTNHPLTLQFDACSVISYGDERTQRQLSNVDKYLCPYCSESTKYKHGALKSPCGDWTDVWWTTQYGGWTARPPSSNKLQGLKQKLQLTWSHPIKL

SEQ ID NO: 27605 - protein, 64 aa, Homo sapiens
LSQILKLADSKIHMEKQRIQKNKQKTLIKKNKTGSLIHPAFQLHCKATVMKAACYWHKKRHIDQ

SEQ ID NO: 27606 - protein, 51 aa, Homo sapiens
LLRHQRKTLGGHRKRQLCADQEEGPHQNLAKLVPFSHSSQTSSLYNGLDGS

SEQ ID NO: 27607 - protein, 307 aa, Homo sapiens
LPVCPCRAPRSGGGLGELCCPVSGVWGSAASTPVEGGLVFQGQSLITMHDQPQLRPQRPLAGGPGRRQGRRWRWWTGVGVCPEQVGVVPVLAPAMRSHPRTLLLFLSPSMCLVPRGCWRHSGFHADARSTTACARRIHALLQMFHSTPSSTFTDRPPAPLVPEHSITPKRKPRPLQQSLPAPPQPGPPPICFLSLRIGPSGHLASMQSDWLWPPGTGVFPPASRWGHKQAMGSHGRIWSKSMARSGLQLEGASSSAWSDPRSPCLTQTWKVLTLGCTSISREQGTIISLSTRLPTRRAVANDGAWGG

SEQ ID NO: 27608 - protein, 242 aa, Homo sapiens
VFQGQSLITMHDQPQLRPQRPLAGGPGRRQGRRWRWWTGVGVCPEQVGVVPVLAPAMRSHPRTLLLFLSPSMCLVPRGCWRHSGFHADARSTTACARRIHALLQMFHSTPSSTFTDRPPAPLVPEHSITPKRKPRPLQQSLPAPPQPGPPPICFLSLRIGPSGHLASMQSDWLWPPGTGVFPPASRWGHKQGGVRTCIHRQWGAMGGYGARAWRDLGCSWKARPALRGPTPGRPASPKPGKS

SEQ ID NO: 27609 - protein, 14 aa, Homo sapiens
MTGMNHRASETPRL

SEQ ID NO: 27610 - protein, 259 aa, Homo sapiens
LQGSAPRLLPPGSLPSLPPGLCPIDAIVFPRRPPPPSRRRPRRRKKAPFRRPSNRQRISVARATVPGLPSAFAWAPPVTRTTATRSGQPSTRPPSPRQPSPDPPTPGRRPGPVRRPPRPKPPPRAPTSATPRLRGSLLLLPVFSPPRGGGHCSSPGRGAPGWTRLWGSLLGRDSGTALCCGRAQPPAGFGARTLAWDCPTATGSSSKCKPCPFPAENPPLAPLENRIQAPRSPWRSGCVASSLKPPRSLCLSKALACVL

SEQ ID NO: 27611 - protein, 307 aa, Homo sapiens
VVWRQGEGQADHARNPSPSPRGPRSRPKRCTRQALGPEKKKKNGPGLAQAGGGGSTTRHDFLLAYSPGLCPIDAIVFPRRPPPPSRRRPRRRKKAPFRRPSNRQRISVARATVPGLPSAFAWAPPVTRTTATRSGQPSTRPPSPRQPSPDPPTPGRRPGPVRRPPRPKPPPRAPTSATPRLRGSLLLLPVFSPPRGGGHCSSPGRGAPGWTRLWGSLLGRDSGTALCCGRAQPPAGFGARTLAWDCPTATGSSSKCKPCPFPAENPPLAPLENRIQAPRSPWRSGCVASSLKPPRSLCLSKALACVL

SEQ ID NO: 27612 - protein, 188 aa, Homo sapiens [sequence omitted]

SEQ ID NO: 27613 - protein, 130 aa, Homo sapiens
VILRITQEAFPASPARVSLGTHRIGEGLAFGLGGVLRVSGPVPGGRAGRGGPGWVVPPERLVSAGAGGGRAETDLSPPPRALPAPPPHHPPPPPCAARQGPGIAGLQLGQPRVTPAHAFPAHRTRPLGHT

SEQ ID NO: 27614 - protein, 124 aa, Homo sapiens
LPAKSPTPTTHTPQSEACDCPTSKLLFKEQTKQAGLSLGSPLVALAASGSQLSPTYRSTEHLSPTRELGEGRMTQELHSERLRSTFLLALATLVIHVPTATAAAHLSTPQPYSGVQERVQMGPI

SEQ ID NO: 27615 - protein, 66 aa, Homo sapiens
LVNRARLRLKKKEGNVKRGSRDWSDVATCQGIPETTTGWKRQEMGFLPEPVGKHDPADTWISVQQH

SEQ ID NO: 27616 - protein, 138 aa, Homo sapiens
LDEQRDCQDSQQIKEQKFVHFLAQDSLPALKKEEIYQKELGTRAPGGPRVRVSTSQAYETLSILSLGVLVFQTFIPLGECSSTPSSPLRPNQESGPTQLHLSFRDPRVPRTPMPFSPEVVCNCSHRFCSPQPRSRPHK

SEQ ID NO: 27617 - protein, 120 aa, Homo sapiens
LGADQGEHAALRLQGCLFEWQLLLETMQNKPRAPQKRALPFPELELRDYASVLTRYSLGLRNKEPSLGHRWGTQRLGRSPCSEGSQAHTTDAADVQNHSKEEQRDAGAQRRCGQGRHTWA

SEQ ID NO: 27618 - protein, 78 aa, Homo sapiens
MMLLLRAEPMRLDAVLILFCCCFICCCHLSLLRADPFPFSLLSVSSLSLSLFLSALCMCVCVCVCVCVCIIEVPINAS

SEQ ID NO: 27619 - protein, 44 aa, Homo sapiens
LIIEEACKLAENKSYQDLLLQLHIEDSSLFKNTLIFPVSFIAII

SEQ ID NO: 27620 - protein, 102 aa, Homo sapiens [sequence omitted]

SEQ ID NO: 27621 - protein, 47 aa, Homo sapiens [sequence omitted]

SEQ ID NO: 27622 - protein, 98 aa, Homo sapiens
LKSYRIAQFLSARKSLFLPLSYLRRVWVSELGLVAESQMLHLGQTQHKEISVMKGRQLLNNQWHTRNMLVASYVNENCKMLMCKIERICSVHYRCNKI

SEQ ID NO: 27623 - protein, 90 aa, Homo sapiens
LDTGAQVSFQDSDFISFGCIPSSGICVHKEIFHVYSGAITGRSFHFLQGIFTYIVERLRSSMICSLQAGYLPGLVGHKANDINSSSSLKA

SEQ ID NO: 27624 - protein, 59 aa, Homo sapiens
LDTGAQVSFQDSDFISFGCIPSSGICVHKDPAFVKITEDHMRRHHFNERTRNLKFNNKA

SEQ ID NO: 27625 - protein, 41 aa, Homo sapiens
LDTGAQVSFQDSDFISFGCIPSSGICVHKVITKQVLPTHGF

SEQ ID NO: 27626 - protein, 42 aa, Homo sapiens
LDTGAQVSFQDSDFISFGCIPSSGICVHKIKVKQMKYYEVSR

SEQ ID NO: 27627 - protein, 97 aa, Homo sapiens
MPVPFVRIDNLKQKKKALLLYLGHRVRVPILSKLATPQPEDVTGERRSRPSCGLQTSEPRPGLTKCVLTVWPSSHWINFTGVFTRMIFFWKIPRCHR

SEQ ID NO: 27628 - protein, 85 aa, Homo sapiens [sequence omitted]

SEQ ID NO: 27629 - protein, 86 aa, Homo sapiens
LPPGRGYRNERGLNRRFRRSTDLECSRASARWSPGPGERSCKDLSFTLTYLQASPSRKAKEVRGGERGGVLLTSVGSHGQHPGNRQ

SEQ ID NO: 27630 - protein, 224 aa, Homo sapiens
LCHLALRQTLRGAPHPLPQGLTLLPACRDPLLAHGSRQGLGSHLRVSRRFSKVCGDWRASSLPQLELPILCAPSPQLAPPPRFQLTFFSSTQTPSTLICLPISIPGPSLSLSGSWSTPLDLSPKMAPWTLHTGPAVAQDPGQLRGLQPGSLCVWGFAKFSHLLSTGGTGWGAGSPAPPVWSLLTAEEGKGEDEPFKFNDMATAAPAGAAIWRGRVSHLQWRAGA

SEQ ID NO: 27631 - protein, 159 aa, Homo sapiens
VPSVTPFFDSERELPDPLRFPSEATPRPASARARCAHPLTCAHCLALPSEMNPVPQMEMQKSPVFCVAHAGSCRPELFLFGHLDSSLPDFSLRKSSATVIKDSKINHSSSTSSYCEDNKVEDLDDDLLSLEQSSSGKGENVLQKCNLTFSFPDGMVIII

SEQ ID NO: 27632 - protein, 120 aa, Homo sapiens
LALPSEMNPVPQMEMQKSPVFCVAHAGSCRPELFLFGHLDSSLPDFSLRKSSATVIKDSKINHSSSTSSYCEDNKVEDLDDDLLSLEQQEQLREGRECIAEMQLNFFLSRWHGDNYLKNT

SEQ ID NO: 27633 - protein, 93 aa, Homo sapiens
VERDSSRLTSCLLRTSRAGPESGPGTERQIGTTEQIYQGMLANLVFYYDQGRMAPERSLLCDWSSYIASMFDSSSRNVSIANSMSLRSQNLSQ

SEQ ID NO: 27634 - protein, 80 aa, Homo sapiens
VAPSEAHCSLDILGSGDPLTSAYRAAGTTDACYHAQLIFVETGFCHVAQRGLELLDSSDLPTSASQSAEITGMSHLAYPC

SEQ ID NO: 27635 - protein, 91 aa, Homo sapiens
LQLHCRDNSQCWINGWQDSTVKGAPSSEARGPSALFSPGASKKERIGEEGPGSGFPRYNFKLNISWLLKMRKKHSTIYKLQCCHTNDQENI

SEQ ID NO: 27636 - protein, 49 aa, Homo sapiens
MGCLLPESNSCYYCKYHCHEYPQQDPLPDLHEQLCEIPTASCWASDMRG

SEQ ID NO: 27637 - protein, 42 aa, Homo sapiens
LLPESNSCYYCKYHCHEYPQQDPLPDLHEQPTASCWASDMRG

SEQ ID NO: 27638 - protein, 41 aa, Homo sapiens
LNLTPATTANTTAMNILSKTPFQTCMNSCVKYRLLHAGLQT

SEQ ID NO: 27639 - protein, 74 aa, Homo sapiens
LSKEAEMHGERIRVGMRKQRVVRSVRAKRQETCGTWGQLGPELALEEHPLPAGARRGPFPWVKFPILLKGQLKK

SEQ ID NO: 27640 - protein, 40 aa, Homo sapiens
LVHYTSLSCTHINPEPWAPKGDEQAEQRQNGRAEKKRRSI

SEQ ID NO: 27641 - protein, 108 aa, Homo sapiens
LQEGHGAGGLHQEVLRDRKSDRDGSWASRCLAPRLRQGQLVLSSRSLSCSAMSGWAHARVEGMWGPCCQLRMDRLLISGCDSTVISQESSIRLHGLHAILESTHLPSP

SEQ ID NO: 27642 - protein, 34 aa, Homo sapiens
VGSGRSGEDAAPSRGRPEEGVPSGGGPARGWARV

SEQ ID NO: 27643 - protein, 121 aa, Homo sapiens
LERKQGRSLPCGPGAAQRDDTGPHGPQDPRRPLGARASQGSHEGPAGSEPGSPAQDAMSSPALTPLPFFLSFVFLLFFSFLFFSFLFFSFLFFSFLFFSFLSLLLFFPFLSFFSFSFKQKA

SEQ ID NO: 27644 - protein, 144 aa, Homo sapiens
LETPVPKDMPPRSVEMPPFGQRACRGPFLTLACWGAPAPTPFPNLPSNSFKTTPQRASAGAPGTRRARLPGPTRVAGRGLGRLPARLVRPQPLRSAFASRVSRGRRALRELHEAAPGPASAALAARGQLRAGGSGWLECGARPR

SEQ ID NO: 27645 - protein, 266 aa, Homo sapiens
LRPKSEATGPRAHSQPPPDWDKAMQRASAPFLLDFKDAWFLCPISIQPSLLHLGLDIFARDRSCDCAFTAVSPAPSTGPATQWSGRVGPAMAPRRPETLEGEQGLPSPLLPVFSHTGAHTAHSPGAEALALSCTRCRNNTSSWRRLCCWSCRRLELCLTPRRPRSMLVRAALWRLSVFSSFAFLLRMLASSSCCLVSRACNRFSSALRGRGRTEVSLASSRSTHPRAPPRPWSPCSPTMRLKCGGTSCAHCRHRLRRGEKRYPALE

SEQ ID NO: 27646 - protein, 230 aa, Homo sapiens
MPGSCAPSPSSPLFYTWDWTFLQETGAVTVHSLLYPQHPALGLPHRWSGRVGPAMAPRRPETLEGEQGLPSPLLPVFSHTGAHTAHSPGAEALALSCTRCRNNTSSWRRLCCWSCRRLELCLTPRRPRSMLVRAALWRLSVFSSFAFLLRMLASSSCCLVSRACNRFSSALRGRGRTEVSLASSRSTHPRAPPRPWSPCSPTMRLKCGGTSCAHCRHRLRRGEKRYPALE

SEQ ID NO: 27647 - protein, 66 aa, Homo sapiens
MILVAFCLCPRDLWNFELERDDLQYLVEEISKQQSFQEVTWVLLKSFSFKGKQSIKVWKICSLTMR

SEQ ID NO: 27648 - protein, 266 aa, Homo sapiens
MPTGGAKRFLQNSPQPQPSKALAALTQLRLHRAPAPAPSPRPVPLFPLHSFRPEDQGVQSTQEQRRGCPSRMRQEVQRKCDTTCRGRQGQSRSPSAHSREEPRKDSNIFSDVGPLISCGTKSSCGALVLICSVFLLMLEKRTLRMGTRQQLLQDRRIFSRGPGFHAAKADPRGRKRLTTGLMTQAETQKEVQQRQAAMQETALWFTGHIQPKTHKHTGTHTQTHREWERNTQRLRDRERRENGRHTHTQTKGHTAEALKHTPPGNP

SEQ ID NO: 27649 - protein, 119 aa, Homo sapiens
MRSPRRTDPCPGRRRRQDWHRGVGALDLRATSDSARKATLSSPNRRIRPRWRKWVRGSIPTPPLQIQTLRYHRSASKKACASTRMGNCPRGILWGNCQKKKKKKKKKQLKKNPDKDPTS

SEQ ID NO: 27650 - protein, 299 aa, Homo sapiens
VTPSSVQTAGTHSGQDPVPGLALRTASRRNCQAAGTRGSCSSWEDAGPSILLCSTMRCGVSSVPGEIPASFPSETLGRGHVQSQCPDPRPTVPGDLQREPLLKRRRLRHLLCLPLVTTKTDAPSPQDSSAALQRMFAEHLLSARHCARCRGSCNKQNSCFYGAHIHRMVREDPAEKPPFEPRLEELRLRARMTSRVEPSRQKNNRVKVFRHVQAPPLPGQAHVTYEDNGTSQRQSNTSPCKNCQCNRPLPYLSSHLTNIDGPPLNTGCCAGVWDTAPDTQEMGRAFLSLRLRRSSNLLP

SEQ ID NO: 27651 - protein, 164 aa, Homo sapiens
LQREPLLKRRRLRHLLCLPLVTTKTDAPSPQDSSAALQRMFAEHLLSARHCARCRGSCNKQNSCFYGAHIHRMVREDPAEKPPFEPRLEELRLRARMTSRVEPSRQKNSEYKASNRCAGMFPENRGGSHSCGRVRRGAAGGEAREALEAEAAGLMVIMKLRVLL

SEQ ID NO: 27652 - protein, 157 aa, Homo sapiens
LPLLKSRKGLVCLEGCATWQEENKHLGNSGCAVHLLCGLRQATDFSELRIYKLRISNRRISVKYFKNRRCLSDSLHLKGTKRMQRIPCHRNHCLQCHAWQFLFVRISPCFRVSDKSAFKMSAYAGISCKDSTWEEAVSRLRRLLGGFSSLRAVRLRT

SEQ ID NO: 27653 - protein, 63 aa, Homo sapiens
VEECEMIDALQKMYEDNAPKKSSVYKWITHYMKRQHNVEDEACSSRDHTPNLQGKHASCSCPN

SEQ ID NO: 27654 - protein, 131 aa, Homo sapiens
MAQGQGRMGWTTGPSDQASGRGRDRQEEVVEGEAVCASGKPAPLKEQEHSGAWLPGERRKPRVQPAPGSGASRPPPPPAPRAAVARPCFDSGGRPQPGAPGFPTPAPRRAPLYPQHRGRRAGRRVIPYEKL

SEQ ID NO: 27655 - protein, 150 aa, Homo sapiens
LAVCGSHFPQGLLVPNTLLAREAGIGGHRPLTSRSSCSCQAGRFPRRSCEHVGMKDSWRGLGEEESPLCVDGRRLITDLSGVAADLKSGGLSVGTFSYPSLWDPGGLGTWSVSCESCVLLLPRLQSEGSVGMGCAVSLVRPTLQVVRGAS

SEQ ID NO: 27656 - protein, 47 aa, Homo sapiens
LLLKFYFVPQGSSAHGCVDKTQRESRIKLGLAGVYNFCTFPSLVTKS

SEQ ID NO: 27657 - protein, 53 aa, Homo sapiens
LCFLHYPVREFGLATSKGCTGRALPEVLTEGIPSKRNTIVFNLLSEISLTRED

SEQ ID NO: 27658 - protein, 70 aa, Homo sapiens
VSLNFLSLNIKGHGQYFFKTCPVTLRFYNFVKFCTLLPLKIKMYGNSMSYKDASACLLHCCSVIFQKYSI

SEQ ID NO: 27659 - protein, 70 aa, Homo sapiens
LDRVDHKTYFHIIFEVRRGAAIILIFAFKSSDRHWSTSHMLLLCLQVYLLAVGEQRGLQMQPLCIPLQTF

SEQ ID NO: 27660 - protein, 63 aa, Homo sapiens
MKAQCRQRILMVHVLPHNQSETEHSFTPLNSHHGLKRTVPRGLHYSRRASFVRSVFPPWFGVN

SEQ ID NO: 27661 - protein, 83 aa, Homo sapiens
MDKNSPIKKSAVFKRLIWHIRTHINLREKPGVEVSYDHMGLNKRQNKDNSVPQIFLLPLMLLVLNHLGCGRLLTFNCISHKRN

SEQ ID NO: 27662 - protein, 75 aa, Homo sapiens
LLRMDRTPQLRCFCQKHELESDPPSSSAYQFTPRTTGWGRNQQNLNCGSLCRMHNQSRSFKKKLKEKKIYELKET

SEQ ID NO: 27663 - protein, 123 aa, Homo sapiens
LCDKMSRKKNLKPREEEDTARLHRTPAPLWGKAGQAERGRRGHALLGFSRVCRGRARDRGWDALCSPTPHTPRTPGNTLGVTQAGVEFLEEKLAASWSQGKRSTGAKRSRATEEQDPWGKARV

SEQ ID NO: 27664 - protein, 107 aa, Homo sapiens
LVSTYSSFQSQLKQHCLQEAFPSPRINSPNIIYLWDYLICVPLSPTDSKLHECREHFYCVLCCISSSWFRAYHIVGPIHVCLMDGYEHPTEPQRMSSGSHNLILMVL

SEQ ID NO: 27665 - protein, 101 aa, Homo sapiens
LLPSLDCSDMITAHYNLNLPGIKLSSHLSFPSHWDYRECAAVPSQTGSSVCLCNFPGAECFQLWSFNRTFETRRWNDIGFPVSFSPSCSLLRRSHHEPGDG

SEQ ID NO: 27666 - protein, 92 aa, Homo sapiens
LLPSLDCSDMITAHYNLNLPGIKLSSHLSFPSHWDYRECAAVPSQTGSSVCLCNFPGAECFQLWSFNRTFETRRDRGALSCHHQDWLYGESH

SEQ ID NO: 27667 - protein, 91 aa, Homo sapiens
LDHLSLTLLPSLDCSDMITAHYNLNLPGIKLSSHLSFPSHWDYRECAAVPSQTGSSCFQLWSFNRTFETRRGKTRKVSSSQFYYFGVKDSS

SEQ ID NO: 27668 - protein, 101 aa, Homo sapiens
LDHLSLTLLPSLDCSDMITAHYNLNLPGIKLSSHLSFPSHWDYRECAAVPSQTGSSVCLCNFPGAECFQLWSFNRTFETRRGKTRKVSSSQFYYFGVKDSS

SEQ ID NO: 27669 - protein, 44 aa, Homo sapiens
LGKVPGAVTRRAEPWAGGLEEKKVEALGPTIMNNRGEDKRPAKE

SEQ ID NO: 27670 - protein, 18 aa, Homo sapiens
LHNGFSVEPEGTGWKQQE

SEQ ID NO: 27671 - protein, 144 aa, Homo sapiens
LALPSEMNPVPQMEMQKSPVFCFAHAGSSRPEMFLFGHLGSSRATYFFMKEKNIIESSFTIKSIFHIFACLTSRALEPDCLGFEISSSTYQLLTSGWEHDLMVCYHAALSSSMFSDFILGVVYLPSTCIQAGLCDLLCTADVTS

SEQ ID NO: 27672 - protein, 133 aa, Homo sapiens
LALPSEMNPVPQMEMQKSPVFCFAHAGSSRPEMFLFGHLGSSRATYFFMKEKNIIESSFTIKSIFHIFACLTSRALEPDCLGFEISSSTYQLLTSGWEHDLMVCYHAALSSSMFSDFILAGLCDLLCTADVTS

SEQ ID NO: 27673 - protein, 144 aa, Homo sapiens
LALPSEMNPVPQMEMQKSPVFCFAHAGSSRPEMFLFGHLGSSRATYFFMKEKNIIESSFTIKSIFHIFACLTSRALEPDCLGFEISSSTYQLLTSGWEHDLMVCYHAALSSSMFSDFILVSTFASCSPSLATTMYVFISSLNMD

SEQ ID NO: 27674 - protein, 196 aa, Homo sapiens
LPVCSSTSVFLSLSRSSCVLSPVRSSQRTCAPLNVRALLSTYVRSSQRTCAPLNVRALLSTYVRSSQRTCAPLNVRALLSTYVRSSQRTCAPLNVRALLSTYVRSSQRALLLTCVCTAACVAQLLVCSSANVCNCLCVLPPMCSSRRPATSVPACLSWGFYRHRIGDVAGQVVLENANLGMKTGALVLPYMRVHRT

SEQ ID NO: 27675 - protein, 107 aa, Homo sapiens
LQRHLGSSCPNLEAVGLPLAPRSVQPQPCLPAAVSAMAAATDIRILAGKVDEHSACPEWIFERELPLMRSCFISSQACNLKILGCWKHQVWHQFLHLYLRYSLLMKE

SEQ ID NO: 27676 - protein, 80 aa, Homo sapiens
LSHLLGPAAALWSVLSFSINLCFRSFMLSLLCVFILSKSLFKTPRTWTPSTGNIFWRARQEYDASGFPLSHVFFSSKGFS

SEQ ID NO: 27677 - protein, 95 aa, Homo sapiens
LIPELCNCIADTDRGVPKKNKKQKQNKENKRDIILHQSSSIMNIHLVAVEGIRVTWHQNMLPAGLQQPHSCLLRRKNLKDIREKERPRETAFLWH

SEQ ID NO: 27678 - protein, 128 aa, Homo sapiens
LFWSRNGRKIPGTLVLPAASLRPFSSTDSGMQKSYFCSKRRKCDLQGECTSSSSLRAIAPFINVTQPFGNRLLVLGAWQGKKTKNSFEGEKASLKMPYLGKTSEPRLDVCSHYFTCCQSNQYSEKTAF

SEQ ID NO: 27679 - protein, 133 aa, Homo sapiens
LFWSRNGRKIPGTLVLPAASLRPFSSTDSGMQKSYFCSKRRKCDLQGECKSQRGTSSSSLRAIAPFINVTQPFGNRLLVLGAWQGKKTKNSFEGEKASLKMPYLGKTSEPRLDVCSHYFTCCQSNQYSEKTAF

SEQ ID NO: 27680 - protein, 93 aa, Homo sapiens
MQVPGMPCCITGFPGVTSSRGAPLEIPPLRPLGKNIQCLPHQNPSKERGCRGSGSSSLVPERPRSSPLLLHSPPTMLRMRTISHGTGKAMKQF

SEQ ID NO: 27681 - protein, 49 aa, Homo sapiens
MNMLEVLPTFWTYVNRVLNGTSVCCRIRKEAIDDRGEKESGLHIIVGAK

SEQ ID NO: 27682 - protein, 112 aa, Homo sapiens
LRQRATVAPATSTSPAILLSMLLQTRHSFLEGPLASHLQIRTHGLFSAAASSGVPVLLSARCSHTHAHSSRAGLYLRVTLPRSLAPGGWHRVRVFRLVDVPPPTQFVTEPED

SEQ ID NO: 27683 - protein, 180 aa, Homo sapiens
VGLIFLMTRTCVVKASTASSHTEDCFQCMHQITEVGQQVKTIFLFYSFYECPGTRKGTCLYNNTQYKVCNPRSDQPDVCYDPSEPPMITVFEIRLSTGPFLGDTSKVIARTEERGVPKHETLKFDTWATINSNQQGLGCCSRDWEKSYTAGNKYVCHESYSCTNVCQYWSCIIWATWKKD

SEQ ID NO: 27684 - protein, 56 aa, Homo sapiens
MEGAQVPESLLGEGPSAHQESHLRLYMRNTRLLLEQLQISEFATAGDFIQNNFPSG

SEQ ID NO: 27685 - protein, 117 aa, Homo sapiens [sequence omitted]

SEQ ID NO: 27686 - protein, 182 aa, Homo sapiens
LQKSSLVMSGPMLITKTMGEMSPKHVRDLLGSPSHHRPRGLGGKSGFMARPRGPCCMQLRDLVSCVPAAPGMLKRGQGTTQAMASEGASPKLWQFPCGVEPAGSQKSRFEVWEPPPRFQRMYGNTWISRQKFAAEVRPSWRTSARSVRTGHVGLEPPHRIPTGTHPSGAMRRRPLSSRPQNG

SEQ ID NO: 27687 - protein, 92 aa, Homo sapiens
LPRASQMQSDRGVWLFQSCHLACPEFLSLCAGRMKYADNWRVSKAKRSFLERQNSSQETGKFEDLAALSKPSHMAMVDKSYRDCPLCTFAKI

SEQ ID NO: 27688 - protein, 92 aa, Homo sapiens
LHPGEINSFIAHPKPVWWSLHKDAHENGETRSLPLMEGFSRSKSSWSHRLQGMKCYCLIRESELQGDKEHKDHGHQPGDLSVENGILLKDFI

SEQ ID NO: 27689 - protein, 104 aa, Homo sapiens
MQTQTSTQGEYHVKSGVMLPQAKELPEAKRSLEQILPQNLQRKHGLTDVFISDFWPPELHIRCDSFLLAFCHDCKFPEVSPTMLPVQPAELNCHSHPNLQRPLR

SEQ ID NO: 27690 - protein, 102 aa, Homo sapiens
MMPYVQKRFNIAGLSPLSSESPVASLGPSWCLETKILGRFSPFPDKNSWLCLNCANTVYTKCIPSLYQVHTSLYQVYTSLYLVQTVVYTKHLLSFEVWNFGK

SEQ ID NO: 27691 - protein, 55 aa, Homo sapiens
MTSACWHALFVLPFRACSIPHSHHLDFVFINPLLFYNFPGYTYLSKKYNVYICLF

SEQ ID NO: 27692 - protein, 67 aa, Homo sapiens
LAGGLESKQYPRPHGCLRALGPTCGFSGVSQAEHHRTQTRHSHAELTRLQVCWNLEHSSPPAQPPHS

SEQ ID NO: 27693 - protein, 127 aa, Homo sapiens
LPKLEYNGTILAHCNLRLLGSSNSPAAASRVAGTIGTHHHARRIFVFLVETGFHYVGQASLKLLTSGDPLTSASQRAGITGMNHRAWAVLYFYMTGSTICLHQHHHKHLVESKDVEPTDPESQLYSI

SEQ ID NO: 27694 - protein, 241 aa, Homo sapiens
VQQPTQAEGGILYCFCRGLLRFRPAYVHSPGGIIVLGLEDKGAPGHRNAPRAPCSRRDAPGPSARSWRPHTRDPARPPPPAPPRGTPWPGTPALQHPAPRSHRGRVTPGPPLGVRRVPASPREAACSGAWLRAPWRETGVLRRKPSRKPGTGGAGRSQGLGSLQPPNTRHAGSRVPVTPEKVRGVPCSRHPREDGASFGLDQTPHRNAPVRQDSAVPGLLTAAFFSAWDTGRSCLIENTDK

SEQ ID NO: 27695 - protein, 214 aa, Homo sapiens
VTARGERPLPRVPRGRGLQGTSLAEVHPDALREPLNRRGVTPPTPDAGSRGPLLGSNRSSGKSRGEVASSGEAGAVGAAGSRREGWGRRGGRGFLFTQKAPWQPEGNIPRAPAKGEDGVAWTPGLSTRCAEADRKLVWNARTRVGAAARPATERPLGSKSRVPLLPASPLSILSLVGLQDAARRGALEMGSVSPRPWPCGSREKMPSARASSPP

SEQ ID NO: 27696 - protein, 74 aa, Homo sapiens
LPAPVPAGRLSLWDSGLASRQQAGASDAHSRRGRLWRRLIPVSARMMPAVLLRHLPLSSHPLMGFPVASTLWLF

SEQ ID NO: 27697 - protein, 64 aa, Homo sapiens
LGEIPVPMFPGESVRGSLHPLLTPASCRTHTQSHILSPNMASLSQNTHKSTLTVTQDHKHALEI

SEQ ID NO: 27698 - protein, 159 aa, Homo sapiens
LQVPSPALREGSQGPVRNRAQRWWAGTAGGSSTPSAAAGLGAKPLIARGRQGRPAAPSAGPAKPTPTRNSSWPASAARRPGSRSRLSLHTSLEAEGAGSGLGQPRKGLSQCSGALKASSSATKVGAQAEEARRASEGCEDCQHAVTSHQQQSIGVDNDP

SEQ ID NO: 27699 - protein, 152 aa, Homo sapiens
LQVPSPALREGSQGPVRNRAQRWWAGTAGGSSTPSAAAGLGAKPLIARGRQGRPAAPSAGPAKPTPTRNSSWPASAARRPGSRSRLSLHTSLEAEGAGSGLGQPRKGLSQCSGALKASSSATKVGAQAEEARRASEGCEDCQHAVTSHQQQR

SEQ ID NO: 27700 - protein, 70 aa, Homo sapiens
VMMNISIMETQSITLEVSQVLLWWKRSQTNADLGLPLRPQSNLQNCEQNRLIFFINYLVCGILLKHQKIK

SEQ ID NO: 27701 - protein, 25 aa, Homo sapiens
MCTIDWAQWLTPVIPALWEVNAGGS

SEQ ID NO: 27702 - protein, 87 aa, Homo sapiens
VPHELSENQKNLQFEVSSSLILPKNNEPFLYWIVMWDKSGFFTATTEDELSVRRSSKALPKAKLPPKKDNGCCLVVCCSSDPLQLFD

SEQ ID NO: 27703 - protein, 132 aa, Homo sapiens
LQAEGVGSGLGQPRKGPPQCSGGLKGSPGASKVGAQAEEAPRAREGCEDCQHAVTSQNQGRNLRSVFQHTTWILMATSAERTPEGKGIYQKASSVKSMQCFPALVQIEGERIPESPLERELLCQDTSALEFV

SEQ ID NO: 27704 - protein, 194 aa, Homo sapiens
LLRVWGPAEPTPIQSSRWLTSGTHSPGSRLRLSLLTSGQAEGAGSGLGQPRKGLPQCSRRLKGSPSAARVGAEAEEAPRASEGCEGRQQAVTSQYRTGQELENHQTARVKGAITLSWAAHQAMGGDMFLDCGSEEWQPFWGLRLWDALSQSCCKSPPASHWHQAATPHNSSRAGIAQEPWARVKQGSRTETALT

SEQ ID NO: 27705 - protein, 98 aa, Homo sapiens
LATPVSSSNLLGPPFTLWKLCSFALHNKSFCCSLFGSVSSLRAITLTAKVCSSILEVSETTNPPEGTNSGHILETMKGLSPSGLMPSSYRWSYKWNTK

SEQ ID NO: 27706 - protein, 67 aa, Homo sapiens
LLCRTLPLPLQGPFFASIQQEVARVVITQFPTAVRVSCLEGGLSDEASRTSWVEWGLGELFCHTRGL

SEQ ID NO: 27707 - protein, 46 aa, Homo sapiens
LGKKKLCPSKLMLVLHKPETMGKRHLTDTKMYDVAVQLKGSQEVEV

SEQ ID NO: 27708 - protein, 76 aa, Homo sapiens
LGKKKLCPSKLMLVLHKPETMGKRHLTDTKMYDVAVQLKGSQEVEVEKRKKENSLNLKTDHQCFMVCQYKNIINLI

SEQ ID NO: 27709 - protein, 68 aa, Homo sapiens
LGKKKLCPSKLMLVLHKPETMGKRHLTDTKMYDVAVQLKGSQEVEVEKRKKENSLNLKTDHQWLPLGL

SEQ ID NO: 27710 - protein, 129 aa, Homo sapiens
VLYQYILLPVIDGWAADASKCYTGSMAEEASGNLTIMAEGEGEAGTSTHGQSRRKREKEEVLHPFKQPDLVRSHYRENSKEEICPHDSVTSCQTPPPTLGITIRHEIAGGTQIQTISYSLYIWEINFFL

SEQ ID NO: 27711 - protein, 138 aa, Homo sapiens
VCFSQPEGPFGISVPTWSGTPAERRDMSHPIFVPHSVWVSWLPTEAIDKPETVIQETVEVTQGEKQALRQTGNLVHQPRLGISFSLLKELGTCVPLSVTGVPSLYLGKSRSFISVVESHTLRYLSLNSTGTLISAFEF

SEQ ID NO: 27712 - protein, 73 aa, Homo sapiens
LAPPRARRRLSGGDSGWSPALTSPTPTSALARKKKKKKKIPDSIAESCQIRKINKNRRSAGASYKKGFVHRFS

SEQ ID NO: 27713 - protein, 156 aa, Homo sapiens
LKFWCIFGFPFSLEKKFIEKSYLYELTVQYTNFTLIFFFLSFSFFFFFLRQGLSLLPRLECSGTITTHRSLDLLDASDHSFISMPSEGLDTEDSNSLSLRWEKTFLKSKKIHDGQNLHTASILFIYIFKKILGHTLQNLSQKRNYSLDKQRVNIHS

SEQ ID NO: 27714 - protein, 110 aa, Homo sapiens
LLPRLECSGTITTHRSLDLLDASDHSFISMPSEGLDTEDSNSLSLRWEKTFLKSKKIHDGQNLHTASILFIYIFKKILGHTLQNLSQKRNYSLDKQRVNAIKFQTGNQSL

SEQ ID NO: 27715 - protein, 33 aa, Homo sapiens
LRQSRWELQTGAVPIRPSWLRQNRSIGVRGYLS

SEQ ID NO: 27716 - protein, 71 aa, Homo sapiens
LAWKESPGFQCHRGPQPVAWPWDTNPGAIPSAWEEGVMKTRGIPEEKPSEIGRRRNGTSGGGNSPDNRTGT

SEQ ID NO: 27717 - protein, 96 aa, Homo sapiens
LASAAGGREKDRERGGADTRDREKTEEDKPRERRKEKPKAEKQRKEKDTNPGAIPSAWEEGVMKTRGIPEEKPSEIGRRRNGTSGGGNSPDNRTGT

SEQ ID NO: 27718 - protein, 68 aa, Homo sapiens
LEGGAGEELARLGGAGLAQDTNPGAIPSAWEEGVMKTRGIPEEKPSEIGRRRNGTSGGGNSPDNRTGT

SEQ ID NO: 27719 - protein, 61 aa, Homo sapiens
LARLGGAGLAQQDTNPGAIPSAWEEGVMKTRGIPEEKPSEIGRRRNGTSGGGNSPDNRTGT

SEQ ID NO: 27720 - protein, 179 aa, Homo sapiens [sequence omitted]

SEQ ID NO: 27721 - protein, 38 aa, Homo sapiens
LLLGPTPHSPALDDVTNDSSLWHLSAGSAEASLAIAGK

SEQ ID NO: 27722 - protein, 41 aa, Homo sapiens
LRGENHLCAGHLSRLVRCSPRAQFLVSDEVTGAVIGYVHTH

SEQ ID NO: 27723 - protein, 64 aa, Homo sapiens
LLELRRGKNKHPARAGGTGEGSHGSAWPPEGSRDGLTVGFKDVPQVDSLTDSSSNAAVTCDPHS

SEQ ID NO: 27724 - protein, 36 aa, Homo sapiens
LGSNNTDAQSLTKKSQSLKGHGLGTMLTKLPIFPTP

SEQ ID NO: 27725 - protein, 26 aa, Homo sapiens
VMNTLTRGLDLHCSHLSRDWNPADCE

SEQ ID NO: 27726 - protein, 164 aa, Homo sapiens
MQHLQFSSGLSRDSSSLLHVFLAEGLFDAGELKMAALTCLTPQFGRLEWLEAGWTILSFFSSILHGFFIFVGPLSSRLVVFLGYVAVFQEKKKSGTLQDFLRLRTENLRMSFLAYSMNQEKSQGQLGFKERSKRFSSLAGKNSMYTPVWEDLLTAAFEDNLLQC

SEQ ID NO: 27727 - protein, 165 aa, Homo sapiens
MWETLSVSSGLSRDSSSLLHVFLAEGLFDAGELKMAALTCLTPQFGRLEWLEAGWTILSFFSSILHGFFIFVGPLSSRLVVFLGYVAVFQEKKKSGTLQDFLRLRTENLRMSFLAYSMNQEKSQGQLGFKERSKRFSSLAGKNSMYTPVWEDLLTAAFEDNLLQC

SEQ ID NO: 27728 - protein, 102 aa, Homo sapiens
LFESILFKGMRTKFTCAASSPSSSSLSSASSTLILLCGIILFLTFSSCASGNEWWRLDVAPSFLKGYSKKNVLTSKVGFHKEFKDCPGMMDPTEVITRRGQE

SEQ ID NO: 27729 - protein, 109 aa, Homo sapiens
MGLVACVLQCSISVGAIIAVISRTAFSPSSSSLSSASSTLILLCGIILFLTFSSCASGNEWWRLDVAPSFLKGYSKKNVLTSKVGFHKEFKDCPGMMDPTEVITRRGQE

SEQ ID NO: 27730 - protein, 63 aa, Homo sapiens
MEVRVVEIDRKKIEDRREKHFCQLLKLTALFWNFACVSRRLIFGPSFCLGTQFLDSTILCDWS

SEQ ID NO: 27731 - protein, 148 aa, Homo sapiens
LRRLLVKARRALTGRGHQSPGPRRPSPPPRPRPPANNKQSSKILRKEREEREKGRGRTRNQSFARWRWEGSRGDARGQRTGGRQPTWGGGSASEEEASGEESCSALDWARLAGLDIRIYQIQAYVGSRNGAEEMSPGIFQKSIYERVS

SEQ ID NO: 27732 - protein, 132 aa, Homo sapiens
LRRLLVKARRALTGRGHQSPGPRRPSPPPRPRPPANNKQSSKILRKEREEREKGRGRTRNQSFARWRWEGSRGDARGQRTGGRQPTWGGGSASEEEASGEESCSALDWARLAGCVESGTQKINPQSCPRSGE

SEQ ID NO: 27733 - protein, 78 aa, Homo sapiens
MRVQGYVKMKQMRKDPFTFLQKICGSLESCYWLLVVPDFTCLFQELALWPFVLMISLDNQPLFLHLRQYSTSCNHHSA

SEQ ID NO: 27734 - protein, 76 aa, Homo sapiens
LESCYWLLVVPDFTCLFQELALWPFVLMISLDNQPLFLHLRQYSTSCNHHSGAACFPWPPSGGVTIWWVRGSLRLR

SEQ ID NO: 27735 - protein, 95 aa, Homo sapiens
LESCYWLLVVPDFTCLFQELALWPFVLMISLDNQPLFLHLRQYSTSCNHHSGKCCLLSLATKWRCYHLVGQRIPSFEVGYGIASTLICCQQCSPT

SEQ ID NO: 27736 - protein, 113 aa, Homo sapiens [sequence omitted]

SEQ ID NO: 27737 - protein, 171 aa, Homo sapiens
VIPQSASGARGSSSPLGGRKPAAGCCCPLPCSEEKRLHNFVRERGSLLRRLLLLLPAAGLPLCWSRALEAEEGGWGAGPLGRALPPPPPGKGLASGQPGVRSPDEKGADQRQPSGPRLCSAPAPPRRSRPAAAGPATLFRKISPTTFPGQRLPGLGGHRGHRVGNLAPQVT

SEQ ID NO: 27738 - protein, 40 aa, Homo sapiens
MPLRASSSQEGAQRSSSTSSILDFRLFVKGWDSARKATQI

SEQ ID NO: 27739 - protein, 37 aa, Homo sapiens
LNFGVYEDVKWCILQCSLYMLIHLGMGSHSVLFYPIK

SEQ ID NO: 27740 - protein, 470 aa, Homo sapiens
LQSTPPSNRRALHPATTEQSIQQPHLQSTPPSNRRALHPATAEHSTQQPHPQSTPPSNRIRRALHPATASAEHSTQQPHPQSTPPSNRRALHPATAEHSTQQPHPQSTPPSNRIRRALHPATASAEHSTQQPHPQSTPPSNRIRRALHPATASAEHSTQQPHPQSTPPSNRIRRALHPATASAEHSTQQPHPQSTPPSNRIRRALHPATASAEHSTQQPHPQSTPPSNRIRRALHPATASAEHSTQQPHPQSTPPSNRIRRALHPATASAEHSTQQPHPQSTPPSNRIRRALHPATASAEHSTQQPHPQSTPPSNRRALHPATASAEHSTQQPHPQSTPPSNRRAHTLLKCAGACSRKNHMLGHRESLNKFQRTEIIQSGLHNHNGIKLEINNRRKFEKFTKMCKINNTLLYNQQIKEEITTEIRKYFEMKGITRKPQTNILKNINAKILHKILANQIQQHIKRIMCKTR

SEQ ID NO: 27741 - protein, 57 aa, Homo sapiens
LISLCSCTYVAIRFSTRILRERKSYFFFFLCLGILQQMSLLWWSSHTSPYTSQRECH

SEQ ID NO: 27742 - protein, 79 aa, Homo sapiens
LISLCSCTYVAIRFSTRILRERKSYFFFFLCLGILQQMSLLWWSSHTSPYTSQRECQEVRAQMGGGAWKQCLSWMIKSH

SEQ ID NO: 27743 - protein, 94 aa, Homo sapiens
LISLCSCTYVAIRFSTRILRERKSYFFFFLCLGILQQMSLLWWSSHTSPYTSQRECQEVRAQMGGGAWKQCLSWMIKRLPEPFLVVQEQPHCWK

SEQ ID NO: 27744 - protein, 98 aa, Homo sapiens
LISLCSCTYVAIRFSTRILRERKSYFFFFLCLGILQQMSLLWWSSHTSPYTSQRECQEVRAQMGGGAWKQCLSWMIKRYKHEGQVRRLTPVIPALWEE

SEQ ID NO: 27745 - protein, 55 aa, Homo sapiens
LISLCSCTYVAIRFSTRILRERKSYFFFFLCLGILQQMSLLWWSSHTSPYTSQRE

SEQ ID NO: 27746 - protein, 115 aa, Homo sapiens
LNPCVAREKEQWEAMRAGILTSSSGPVALSRGTDWKQMWHKSPHAASLLTLRTSTLGTSRTKKTLSHMLAAVPIYDGCKFHLPAAVHEWKSTWDPLLTWRPTHPNAYLAAPVDVS

SEQ ID NO: 27747 - protein, 133 aa, Homo sapiens
LPRDSPVASQKLPRMAQHMRRLPISLSPRWEAMRAGILTSSSGPVALSRGTDWKQMWHKSPHAASLLTLRTSTLGTSRTKKTLSHMLAAVPIYDGCKFHLPAAVHEWKSTWDPLLTWRPTHPNAYLAAPVDVS

SEQ ID NO: 27748 - protein, 106 aa, Homo sapiens
LSWEAMRAGILTSSSGPVALSRGTDWKQMWHKSPHAASLLTLRTSTLGTSRTKKTLSHMLAAVPIYDGCKFHLPAAVHEWKSTWDPLLTWRPTHPNAYLAAPVDVS

SEQ ID NO: 27749 - protein, 320 aa, Homo sapiens
LSRRLHRQGTRLPPSRQGTRLPPSRPHRECVRGDPWPAGGALGHSIRPVTAGSRCSIPPVPPSRLLPQPSSASAFAPRLLPSPSQSRREAGLGERVSPGSTVEARGAGAEPAQGCRRELQGWPGAHPLPGARERRGTLCWICVLSGHASASGLGTRRETQMWVISLWKLYPRPWEWRALGCEWRQDAPRAREREVERVPDGRGSEWEAAGLGEPRWGRRGAQGASCPLHLRLRELICFTLGRCRICACSHLTSWAVPEVTGRVFSDEVTHTSHHGMTVSRCHGRCVKIAPVVNWKLAVPGSASTGLMHLCSSFFIKIQSV

SEQ ID NO: 27750 - protein, 120 aa, Homo sapiens
LNLGLLASLLSRLSFQLYLMSWCRNREGGRVRPPFLPLSSPCSFPWPNSPFQNLLETQGSHTSFPLLANTSNTRDTSGVSKGDIPSVRNPCPLFPSQKTQRWAKGFLVPASRRPSMSPYQ

SEQ ID NO: 27751 - protein, 112 aa, Homo sapiens
MPKCSAMITARCSLELLGSRHPPASLRHQAQLIHFKNLLFIYLFIFGREGGLTRLPRLISNSCALGILSFRKCWDFRREPPRLAYKSLFIFVNFYQRIYSGLTHHFTNKATS

SEQ ID NO: 27752 - protein, 61 aa, Homo sapiens
LPSTINKSSLRPPRKWKDDGAMLVFPAEPMMKKYLLWNYFVQKKKVENCQRNQNKDLIEKI

SEQ ID NO: 27753 - protein, 96 aa, Homo sapiens
LGEPTGEGKQLRREDEHKVGKSKNELEPKTRAGHSFTVSNFKDMSILARGADTFCHRTRHTHSSGIKKGEGRLREKLLPHPNKVNQLIGDKVDEPQ

SEQ ID NO: 27754 - protein, 93 aa, Homo sapiens
LRVQGKQLRREDEHKVGKSKNELEPKTRAGHSFTVSNFKDMSILARGADTFCHRTRHTHSSGIKKGEGRLREKLLPHPNKVNQLIGDKVDEPQ

SEQ ID NO: 27755 - protein, 90 aa, Homo sapiens
LGKQLRREDEHKVGKSKNELEPKTRAGHSFTVSNFKDMSILARGADTFCHRTRHTHSSGIKKGEGRLREKLLPHPNKVNQLIGDKVDEPQ

SEQ ID NO: 27756 - protein, 43 aa, Homo sapiens
VFGSQVRGLFHTGFKVSFIFINEESYLGARKMSEVKVEWNTIM

SEQ ID NO: 27757 - protein, 38 aa, Homo sapiens
MQGLFHTGFKVSFIFINEESYLGARKMSEVKVEWNTIM

SEQ ID NO: 27758 - protein, 239 aa, Homo sapiens
VRGSAGVRAGTAWTRVKGGGGTEMNMKNDSASFSAPVLTFFGSVDIPGTILAPCTFILTKSLRTWKWNFVFLQLPAPRECAEEGKIEKPKKREAHKWSCSGTGGGVVAFRPPPTPKDPGLTAAQLVAKEGAGAHRGGSGGGGDHAVPSLVSELAPALLNAQPGALSDARQQGAVGEMERAAWGSPPAQGWRCAGDAGAPLAFLGLFHTGFKVSFIFINEESYLGARKMSEVKVEWNTIM

SEQ ID NO: 27759 - protein, 176 aa, Homo sapiens
VLPLTLGTPQPQHPRPHNYWGWGQEGEVLPEGLLRGYSFLHRYSRALSGSGHLSPFWALEEPRPSPVLRPCSPLPSAPTPPACSAGAHPLGQPAEPPPPPESASGPLLLLLEEQHPGPRPAVFSVAARLGKSPTPASAPRYPLPPLPGSGDNHLPTHPGHASLTFPPRLASSLLPS

SEQ ID NO: 27760 - protein, 224 aa, Homo sapiens
VPCVHMCCWWTSNYYCVLMRSALCFAASNVLVVTCQCLSNLSADHGREPWERGGLAMPPPLLILHPAATSSCRAPPVSVPVFLYFFLSRSVSASLSLSLSIFLSLHWSVSASASLFLCVCFLSQALAWLMAIISTPTHPSQLTTRFPCETLCLPRSRHQDRMRDAQILLGKTPAGENGHQSLNKSSRNDLPGGARPVAGTLDRIGCSAPRGSQHHLSRSALPQV

SEQ ID NO: 27761 - protein, 229 aa, Homo sapiens
VPCVHMCCWWTSNYYCVLMRSALCFAASNVLVVTCQCLSNLSADHGREPWERGGLAMPPPLLILHPAATSSCRAPPVSVPVFLYFFLSRSVSASLSLSLSIFLSLHWSVSASASLFLCVCFLSQALAWLMAIISTPTHPSQLTTRFPCETLCLPRSRHQDRMRDAQILLGKTPAGENVAARPRTGRDGGLGDTRVSLFLSLSLCISLSLSLSFSAFLSPGLSLVLSVSL

SEQ ID NO: 27762 - protein, 54 aa, Homo sapiens
MTGLVPSGRGRDSRTFSLCHLRTRPEGSPAWTLKLDFQPPELVSISRLIEAGRG

SEQ ID NO: 27763 - protein, 87 aa, Homo sapiens [sequence omitted]

SEQ ID NO: 27764 - protein, 56 aa, Homo sapiens
VKSANKVQPESFTAPDDISPADLPQLHGLMFEFDSVFKPGSNSTSLDSLLCSSEWS

SEQ ID NO: 27765 - protein, 133 aa, Homo sapiens
VLVLRRISVPAKTDHLESSTVSLYKSLRTSSNSPPPPSSGVCAQRGQSLEFLGRECGTAVSPSRHAYEPGDFFFKGALISCTSTLPRKGAQGTRRGLWSAVGLGQAPTVYPSGSGWLGLKGKVRVEGTSFSRR

SEQ ID NO: 27766 - protein, 177 aa, Homo sapiens
VLVRTAEIRLKTDRGLGSLRGGCTDRLCTGPGIQGLGSLIWGKVEKVLRRISVPAKTDHLESSTVSLYKSLRTSSNSPPPPSSGVCAQRGQSLEFLGRECGTAVSPSRHAYEPGDFFFKGALISCTSTLPRKGAQGTRRGLWSAVGLGQAPTVYPSGSGWLGLKGKVRVEGTSFSRR

SEQ ID NO: 27767 - protein, 173 aa, Homo sapiens
LVRTAEIRLKTDRGLGSLRGGCTDRLCTGPGIQGLGSLIWGKVLRRISVPAKTDHLESSTVSLYKSLRTSSNSPPPPSSGVCAQRGQSLEFLGRECGTAVSPSRHAYEPGDFFFKGALISCTSTLPRKGAQGTRRGLWSAVGLGQAPTVYPSGSGWLGLKGKVRVEGTSFSRR

SEQ ID NO: 27768 - protein, 81 aa, Homo sapiens
LLFIGSDCGRHSPFIQSLWPGESSALIGQAWLHGHLKSGVELTPPATHGLMEKGKRSGNPKSLESKLHLVSITQCSRFNYS

SEQ ID NO: 27769 - protein, 50 aa, Homo sapiens
LTDPGKALNPGVWGPRCQDPAIPPPPLVVLFLYQPALSFKVVAECVLNTQ

SEQ ID NO: 27770 - protein, 212 aa, Homo sapiens
VCLHSSALGWSMGLGAVEQGVALVEEARAAQEPTERVGGSGMAGCRSRALPHRKAAKAQREIERSTSGLALLGDLVHSPQLLARVLSPSLPGAGRAGRLLRVRGPPSPRPPGTPAGLQAPQAARVPARASPSTPPCKLREPAPALASPERGSYSAAVGRRAPQVPPKWEPRQRRRRERARAVRTASTLSPLTWITGQKSWGKVFQAKETAAV

SEQ ID NO: 27771 - protein, 30 aa, Homo sapiens
LKGDSRQSMNETPKEGKQMRQAPQLFWLFA

SEQ ID NO: 27772 - protein, 72 aa, Homo sapiens [sequence omitted]

SEQ ID NO: 27773 - protein, 27 aa, Homo sapiens
LLLRVTLPSYPLLETQARKEALQCSCE

SEQ ID NO: 27774 - protein, 51 aa, Homo sapiens
MSPSSTEIVHLFISAVPMPSTGPDTVSPMKEEEEKEEKKKRKRKKERGRGR

SEQ ID NO: 27775 - protein, 26 aa, Homo sapiens
VLSQSDLQIQEKELRSQDNKLVLNKK

SEQ ID NO: 27776 - protein, 29 aa, Homo sapiens
MSLQFMRNEATISPKTPGKAFKLIRKQQK

SEQ ID NO: 27777 - protein, 21 aa, Homo sapiens
LNVMSLQFMRNEATISPKTPG

SEQ ID NO: 27778 - protein, 63 aa, Homo sapiens [sequence omitted]

SEQ ID NO: 27779 - protein, 37 aa, Homo sapiens
LDWKTALPNGKNLSSLAVDPRRMRDTYSRDAHQLANP

SEQ ID NO: 27780 - protein, 108 aa, Homo sapiens
MPGRISVCEKQRKRKTHVTPVNWSNQHKNSPGLKCFACQCPGRVLPVFISPLSCPNQVKIRYSFLVSASLKQHKKRQHSLQKGKGPCGLLWTGVGFNPQEALARGVES

SEQ ID NO: 27781 - protein, 279 aa, Homo sapiens
MNVRRSFVFWSLDWNQSRQLANGGQGDKERERGAAPMGGGCGFPSCLEGGQTPGNCTRSETPPQAPAFLSPFLRGEPSVCNGFSSPETVVLLHQTLLNLQPGDSSSAAPEPAPPTRPVPPAPRLSVHQQHRHQQLQQPPPDTSRPRIPTSGRGRERERERERERERERERERERERAKYLRKRGAANPHGFAIGRGTGRQKGERKERDRERKRSTRSGRGRSHGALPPLTLARSLWLSAQVSGLPPSAPLCPYSCPHTRSIRPKPPALFSLIFHFLFSS

SEQ ID NO: 27782 - protein, 102 aa, Homo sapiens
LPPYRPAADPARPGAPARCPLLSQPGLPRGGCHRAPGTAGPCPGEGGTRAGGGSQPLCSQPWVRSPAAREGFQISLSLSFPICKLGGGGFVPRFERTAGEAS

SEQ ID NO: 27783 - protein, 313 aa, Homo sapiens
LQSLFLQPCSSSQATIAKELFQLTQAQGGLQSQASPSHDCKQMPRHAGWFHVSIQSPDLRSAPALASLAASTAVTKGDKAQTPPLWSSSLVAMTPLSAAGCSTRDALYKAHTKRCACQRGCDESCGSKRKAGREGQREEGKKRKRREEGGGGRKETGMEAGRKAGREGQREEGKRRERGGRRGEGEGRRQGWRQGGRQGERGRERRERRERGGRRGEGEGRRQGWRQGGRQGEKGRQRREREEKEEGGGKRQGWRQGGRQGGRGKKGRRKGMGEGGRGGWRGGRNDGKEGEKDGGQERREGRKRALRRKKYLC

SEQ ID NO: 27784 - protein, 234 aa, Homo sapiens
LPPAPPAAQAAATDTANYHPDKIAGPFTKPEAAPAAAVSVSSRPSSPGVLIASLSVRQEGTSPKGRRPVAAPQACGCSTCRGPRAAHGGPRWYYSHFTGKKQGQSSSQMAHSPSPESFPGPRPSLVTEPAPPPPCSARPMLPALTRSSRPALERRGVWKVCPIPASTTPTETHANAPRPREPRSLPLGDCGRTFRVSRWSSPRLSFSQLSFHLDSSPPPCTGRRSSGCPPLHEG

SEQ ID NO: 27785 - protein, 196 aa, Homo sapiens
LPPAPPAAQAAATDTANYHPDKIAGPFTKPEAAPAAAVSVSSRPSSPGVLIASLSVRQEGTSPKGRRPVAAPQACGCSTCRGPRAAHGGPRWYYSHFTGKKQGQSSSQMAHARPMLPALTRSSRPALERRGVWKVCPIPASTTPTETHANAPRPREPRSLPLGDCGRTFRVSRWSSPSPPPCTGRRSSGCPPLHEG

SEQ ID NO: 27786 - protein, 56 aa, Homo sapiens [sequence omitted]

SEQ ID NO: 27787 - protein, 109 aa, Homo sapiens
LHSSLGDRARLRLQKKREKRTMDQGLLPERRRRRTRSQTPLSSARSGCRGSRLNHGRTRGAGSPPVGPHSSAGLGVRSAVAFPLGPGNAAAEPHSPCSRMRGHRGSPGR

SEQ ID NO: 27788 - protein, 197 aa, Homo sapiens
LTAFLRPAQPRFGAASSDVLSLYPKKHLGQHFLSKMAERTHFWKMNSQEESVPLFLPNLYFCDPGWSQGGRPLAPPLSTCGPQPRILPSCSDEWHRCPAQAGKPLPETDSAGGNSSNRFYRKPLKWRLRPHLAPGPHSTEKKIHPAWGWGLPEMATLWQESLRILSEPGLWELTEGGREREREKEREIIPECAGEEA

SEQ ID NO: 27789 - protein, 254 aa, Homo sapiens
LFEKINKIDRLLARLIKKKTEKNQTDATKNDKGDSTTDPTETQTTIREYYKCLYANKPENLEEMDKFLETYTLPRLNKKEVKSMNRPITSSEIEVVINSLPTKKSPGTDGFTAEFYQRYKEELVPFLLKLLQIIEKDRILPNSFYEANIILIPKPGRDTTKKENFRPISLMKLDAKILNKILANQIQHHIKKLIQHDQVGFIPGMQGWFNIHKSVNVIHQVNRTNDKNHTIISIDAEKAFNKIQQPFMLKTLKN

SEQ ID NO: 27790 - protein, 148 aa, Homo sapiens
VGRGGGFPGKSPEKLHPACAMGMCTGVEPHSFMPFAAGRSLALPLPVWKLEFNLLGEKPSSRGSGLSRVSVSPFSSFSPNKTLSYSSFKLSASLNFHSRGKKNAIFSRTKEKSCNIFSAQRGGRETAVKLQMVMQLEPLMMAPSAGNP

SEQ ID NO: 27791 - protein, 30 aa, Homo sapiens
LKLALISSKMNEFLHLALLTTTTKKKRHNT

SEQ ID NO: 27792 - protein, 81 aa, Homo sapiens
MNSLCLGNSGNPRKLFPLFHLKEVAKTKFSQCQSMDSAHQLPSCPHGFFWENPPLILLRISRHPKEIEPEDCRIAAFDSPL

SEQ ID NO: 27793 - protein, 42 aa, Homo sapiens
LKPCLLDRESTTSQEGNASFPHHRRQDEQSGRERESMAARSI

SEQ ID NO: 27794 - protein, 28 aa, Homo sapiens
LISGDPPPSAFQSAGITGVSHRAWPEIM

SEQ ID NO: 27795 - protein, 16 aa, Homo sapiens
METSGPAGLPPDPASL

SEQ ID NO: 27796 - protein, 52 aa, Homo sapiens
VQWRNLGCNLSLPSSWDYKHKPPRPALIPLLKVDLFCRKSAVFVLKALEFGI

SEQ ID NO: 27797 - protein, 112 aa, Homo sapiens
LPVRLPGAPDLPQDPFALLQPLRPLQLLRRREDVDVEGPVRLCGQLGARQRVVGAQPSHRVLLVLVVVLGLQGAAAGVPALSRAPGPRAGRPRDADDEQAEDQINGVLERLN

SEQ ID NO: 27798 - protein, 18 aa, Homo sapiens
LDPGPGAQGAGVDKSSKI

SEQ ID NO: 27799 - protein, 110 aa, Homo sapiens
LATSGLAPAPPPCSRKPGTAQIPPLPSQKNTPHPVSSSLEILAYPSAKARTECKPQSQSLSRLRPPRPNPAQPGPQAQSGLEPREARFPHRIACFWPRGASALLAVEQNS

SEQ ID NO: 27800 - protein, 83 aa, Homo sapiens
LLIFISVFGQFIGSTNQMRLFPEVEENRTLQLILKYFAMELVTPEQTILDGSAFGRKTSPFPAYIYGRISCWMSRTSLFKKKE

SEQ ID NO: 27801 - protein, 37 aa, Homo sapiens
LRAKWCSELDLSEFQMARVKYGTGKATPRPHQDHTRT

SEQ ID NO: 27802 - protein, 47 aa, Homo sapiens
LVEIQHYTYTPPYILAVNPMEWGIGSAFLIFHSFFLIKWHILHLQLL

SEQ ID NO: 27803 - protein, 7 aa, Homo sapiens
MILPNEI

SEQ ID NO: 27804 - protein, 21 aa, Homo sapiens
MVLLLVTFLSMDDLLGYGESA

SEQ ID NO: 27805 - protein, 16 aa, Homo sapiens
MGKKKESCPVAQAGVQ

SEQ ID NO: 27806 - protein, 93 aa, Homo sapiens
LVPFYSAVPSFWIFVFPFFSLLNDPSKIIFKKPSPLLTFASQPSHPPTESKSFNDPRPSDGRSPPTSQADRPPSPRAGSGPGERARAQPRPWR

SEQ ID NO: 27807 - protein, 13 aa, Homo sapiens
LCGGEREADAGKP

SEQ ID NO: 27808 - protein, 203 aa, Homo sapiens [sequence omitted]

SEQ ID NO: 27809 - protein, 161 aa, Homo sapiens
LHLPGHAGTAGRRARPGLGCGSARVLGTGRECERSGRPGGSRGRAAGWVGPEPLKAEPPPALAIPELSRRRRWLLPDPEFPLSLDGAELWAARAAQLSGDRCTLSSLGKTQRRLGIFLGGRGPAPRRHHVPGDPVLRAAALGLAPVGRSERRRPPGLRESQ

SEQ ID NO: 27810 - protein, 138 aa, Homo sapiens
VSAGLECGRAIQSECLGQSESRTSGQVAERGSVVDGPALESRGEGYESLRICGCEPAAWPWATALPKWRLLTPGNSPEGGAPPNPPGSHPPSRPPPPPPPPRLAWRPPLRLLPGCNRVKWLISRSACQPSSSMAASPG

SEQ ID NO: 27811 - protein, 171 aa, Homo sapiens
LPSASQSSNKRGRRRGEEEEPGGSAAPFTQQPKPGQAARAAPWGRPRSWGEGGSEGASLSETPSSSTQHALSAGRCGTTLPPPPLLGLRQCGSLVSLESPFSLHCINVVAIKFWLRTRSVCGPRTYSKGALLGNAHPVGAGDPEESLWGRGGEEHRCEPRGAPSPDLDFSD

SEQ ID NO: 27812 - protein, 43 aa, Homo sapiens
LAFASVGASSHWRVRSESLWGRGGEEHRCEPRGAPSPDLDFSD

SEQ ID NO: 27813 - protein, 296 aa, Homo sapiens
VATTTWTSRLPRARNCCVQHPVRSPGRDSRLHRLRHPQSVPEEHVGVPGTAGRDVGSEHGANPRGGLGSGPHPWVDAVGLMSFGRTRQAVAFQAKAFGFSVIFYDPYLQDGIERSLGIQWVYTLQDLLYQSYCVSSHCSLNEHNHHLINDFTIKQMRQGAFLLNAAPGGLVGEKALAQALKEGRITRDSFAQGPLKDAPNLICIPHTTWYSEQVSLEMREAAATEFRRAIKGRIPESLRNCVNKEFFVTSAPWSVDQQTIHPELNSATYRYPPGTVGVAPGDFLQPWKGSSLEASQ

SEQ ID NO: 27814 - protein, 102 aa, Homo sapiens
VLDLRGKKKREGEREKEEQERSRKEEEVAKNQLPCWICLSQHLGEALGFFLKGLIFRTPHLSSLLPASSLLWWLGCFFHDFLNLDWAVLCVKPISCDLLLTV

SEQ ID NO: 27815 - protein, 119 aa, Homo sapiens
VLDLRGKKKREGEREKEEQERSRKEEEVAKNQLPCWICLSQHLGEALGFFLKGLIFRTPHLSSLLPASSLLWWLGCFFHDFLNLDWAVLCVKPISCDLLLTGGVDRQHLGLCEGTRGPV

SEQ ID NO: 27816 - protein, 36 aa, Homo sapiens
LLYCYVTFLDPYHIAFITTLDVSSYCRFRSRFASSK

SEQ ID NO: 27817 - protein, 47 aa, Homo sapiens
VLLRFLEQKSKTCGCLGSKSQDCKQLGEKVRHFATSQPSLQGWGSVA

SEQ ID NO: 27818 - protein, 7 aa, Homo sapiens
MSWDQVD

SEQ ID NO: 27819 - protein, 30 aa, Homo sapiens
VAERAFGWECKNSLLRLFQVNITDLAKLAS

SEQ ID NO: 27820 - protein, 126 aa, Homo sapiens
LSPPRGQLAPLPLPELRHGSPGGPAWPLPALGCTSALSPVPGSGLGQPPPPLPRTSGLLPSSQAPTLLAAWPSGRHAPALGHLCPRPGLGASGAGPLRAPGSIAAPGGASICVGEPDLQGPGKGIL

SEQ ID NO: 27821 - protein, 89 aa, Homo sapiens
VGGSIVTSLPPGPGRGSGSVGRGGRTEVAAVGGGGVEGRGAQARTNPHVPGRDPDPAAYREAKPAGWAAEPESGTVWSPLELRSGCSAS

SEQ ID NO: 27822 - protein, 157 aa, Homo sapiens [sequence omitted]

SEQ ID NO: 27823 - protein, 63 aa, Homo sapiens
MSYLPTNPPGSILTCWLGVSLGSHRSARGGSTIYGRLLPRRKDVWFSQAKDVPKYRGLLYLQS

SEQ ID NO: 27824 - protein, 43 aa, Homo sapiens
LFKEIQALLSLPRLFEESHRRCWRLQRHSRCPCCCYRGSQPRQ

SEQ ID NO: 27825 - protein, 190 aa, Homo sapiens
LDTDLGSEFAHVLGQGRERGTGEEPSKIWIETETPSGGSEQRKEEEGGERKPVCNSSFDSAGRRGFKSDFFFFKGERLFPLSRSLLKPGLAQLQTPPARKRERKTDRGRGKKKKKGKKSSRRTFHICNKRPRGWREIPGTQGWSVYFELSGRARARVETLLAPLASETDVQERLFKNARHKDGHPRDYVC

SEQ ID NO: 27826 - protein, 52 aa, Homo sapiens
MGRTLRGPHTQKVEPRPGYEDHPAVWRDEENEVQRDEVSCLKSVTESDRAGM

SEQ ID NO: 27827 - protein, 222 aa, Homo sapiens
LETSTSSLFCVSAPAFGSSLSPAARSHNAASLPFASYCQIASFGFAAPSRRFDASQFSQGPAPGSCADWIPQLASCPTGPLQNPSSAPYCGITFSGSSLSSTQSAPLQPAGGRMTRPSAGTFPELDSPQLHFSLPTDPDPIRGFGSYHPSASSPFHFQPSAASLTANLRLPIASALPEPLYSQSWTTPVDLCLLEESVSGLEGSQYPDYGFQSCSETESHEL

SEQ ID NO: 27828 - protein, 141 aa, Homo sapiens [sequence omitted]

SEQ ID NO: 27829 - protein, 35 aa, Homo sapiens
VVLAVDRLLFCDAHQRWCRRLWPSPGVPRLLPGGV

SEQ ID NO: 27830 - protein, 208 aa, Homo sapiens [sequence omitted]

SEQ ID NO: 27831 - protein, 107 aa, Homo sapiens
VSLVVLQLSTGCMCCEYPKELAVECVFGSVCALSVDTGAALSLKRPRAPGMASACLSPSGAHTPTPCHPMQDSPLCLAAPEAQGQPWCSVLLGPPRSQSLSFVAKAA

SEQ ID NO: 27832 - protein, 13 aa, Homo sapiens
MQRTWKNQSARVV

SEQ ID NO: 27833 - protein, 43 aa, Homo sapiens
LRPRVQDQPGQHSETPICIKKKSDLILLFIIRGLIPEVKVCTY

SEQ ID NO: 27834 - protein, 170 aa, Homo sapiens
LCPFWKLRRCAPEPRGAIRNLVCQLLRVAVPDPTCQRCCPFLRPPCPVQAGPWKGSALPDRDQQSEGLSTGQAQPYVRFTHVNTQDAVYRRAGGGCRGCFPLLGTPIFFLASRVGSAGNQGPIPMGCYPLYPCLPGGDPRGPEQLQARPLLALATCLSLLRGDALGLGWE

SEQ ID NO: 27835 - protein, 132 aa, Homo sapiens
LWPPLRAGGRTAPTPGVQPGAHLRHLLRVLRRLAKDLLAVGEVLVEAVEGVDVRAVQHLLWAAQHLLHEGGVHWAALDQAQAAGRRATSGRGRTPARPQSQPQPQSQPQPRPGPRPRAAPLRWEVRRKGRWG

SEQ ID NO: 27836 - protein, 282 aa, Homo sapiens
LGREGRAQPRSPRDSHAQAPRLEAGTPYFPVMGRPLEGQPLRALDLYPEPAFLRSGKDPKSSPASSPSFAVLGPEVRSTGGQAGSRRRPSAPCSQDRAAAEGAPALLGGSPSSGSPGHPPGSAFGVEAGCRALNVSEHARGGFALGLPFGLSGGAYLFLLLDGAGDPKPTPEAPISSADGRAWFPSESSWQLPQLPAGSTSGSEPRARPGLGPRQLLTGPRDGAAGQGPGRGLTARLGREREIDCGPRQAGHGGTATDTGRAGSGARHRPPRDRGTPGLRTH

SEQ ID NO: 27837 - protein, 17 aa, Homo sapiens
LGVGLNVVPELVAAFTR

SEQ ID NO: 27838 - protein, 127 aa, Homo sapiens
VLRRSHLLQAPKADPETPPNPSTPRLPGSEAGELLLSNQALHPGTLPVMASLCSQVYLSSGTGTFSALNYKHKGTGTFSALNYKHKDSESSPIHPGAQRAGSYESLKVILKDILCPKRKRIRISILE

SEQ ID NO: 27839 - protein, 102 aa, Homo sapiens
LPGPRVAAPLPGFIPWCHQPSCGPLSNVLGKEINIFKLDVSTVLLFCLESGTRGASACAAGAAGNSGCFSLSLSFLGAHFCCFDSRAYQVRSEGGRRQCPFC

SEQ ID NO: 27840 - protein, 145 aa, Homo sapiens
LVLVSNTFPPVPRPLNQRRLSRAARAGPVEFGAAVKNETGRLFFPGVEEGRREVSFFPSVAVSEPNAPSPAPGRKAQGRNLGRSAGAPTAGRGMRAVRARQAERIVFLDPATPRVRTAAPEGRVTAAAALGPVFPAGRYCCSIWQ

SEQ ID NO: 27841 - protein, 229 aa, Homo sapiens
LSRAARAGPVEFGAAVKNETGRLFFPGVEEGRREVSFFPSVAVSEPNAPSPAPGRKAQGRNLGRSAGAPTAGRGMRAVRARQAERIVFLDPATPRVRTAAPEGRVTAAAALGPVFPAGRCGGGAEERRGGRGTGRAAGGGGRTSCTFPPRLSHSDSAEVRRAGAGNKGAERGGERVGRGRAPGRLPEDPGGRKPKCHLNSTQGAGAWDQSVLFSNNGWSTSYKLRESRL

SEQ ID NO: 27842 - protein, 391 aa, Homo sapiens
MAETERNDEEQFECQERLKCQVQVGAPEEEEEDAGLVAEAEAEAVAAGWMLEFLCFSLCRAFPDGRSEDFCRTRNSAEAIIHGLSSLTAYQLRTIYICQFLTRIAAGKTLDAQFENDERITPLESALIIWGSIEKKHDKLQEEIQNLIKIQAIAVCMENGNFKEAEEVFERLFGDPNSYMPLKSKLLMIISQKDTFHSFFQHFSYNHMMEKIKSYVNYVLSEKSSTFLMKAAAKVVESKRTRTITSQDKLNGNYVEMETEASLDTRKRSHKNLFLSKLQHGTQQQDLNKKERRVGTLQSTKKKKESRRATESRIPVSKSQPVTPEKHQARKRQAWLQEEDKNLRSGVRKYGEGNWSKILLHYKFNNRTSVTLKDRWRTTKKLKLICSDSED

SEQ ID NO: 27843 - protein, 336 aa, Homo sapiens
LLIVKKVRQKKQDGALYLMAERIAWAPEGKNRFTVSRMYVDVKCQKISPEGKATIQHQLDLHEGDTINFRFPSENTAVKEQDAVKDLQQLLPKFKRKANKELEEKNRMLQEDPVLFQLYKDLVVSQVMSAEEFWANHLNGNATENSSTSNHKQDVGISAAYLADVWPETDGCNGLKYNLTSDIIEFIFRTYPAVKMKYAESVPHNMTEKGFWTRFFQSHYFHRDWLNTGSKDLSAECAKIDEKGLKTMVSLGVKNPLLELTALGNKPLDEGYGISSVPSASNSKSIEENSNAAIKRFNHHSAMVLAAGLRKQEAENEQNSPAAWMEIPEMQTAFSQ

SEQ ID NO: 27844 - protein, 37 aa, Homo sapiens
LYRRSFEHQLNLIPSLFFSNGTSFFSSLIFSLSSIYS

SEQ ID NO: 27845 - protein, 248 aa, Homo sapiens
LARSPRMALARGAALAGSRREARGREPAARPPACTGCVRGLGTHIPPTTAAPTSLPGQAPGHSLPAFLLPPPSSLHSPPASDPQTESGAESSSGAHLPAIKSCSLACPPAPWSPAFHTALLLPAWLAACRPLRVLHRLSSLGSGPVDLSLRPSSGPGLALGHGPFPLQPWGPAPRARILSSLEVPKEGVSQDLPTLEGVQAQGELDIPPVHAPRAETGIQGGPPSRGVRPGSSWAISVGRDRLAAATS

SEQ ID NO: 27846 - protein, 348 aa, Homo sapiens
MAMRQTLLTYFGHTWPMVDLAFSGITTYGYFLTSAYKDGKPMLRQGDTGDWIGTFWGHKGAVWGATLNATKAATAAADFTAKVWDAVLGDELMTLAHKYIVKTVYFMQDSNYLLTKGQDKLLRMYDLNKPKARPKEISGHTSGIKKRLLWCSEDKQILSADDKTARLWDHATMTEVKSLNFNMSVSSTKYIPEGEILVITYGLSIAFHSAVSLDPITSFEAPATINSASLHPEKEFLVAGGEDFKLYKYFNHGEEFESYKGYFGPIHCVRFSRDGELYASGSEDGTLRLGQTVVGKTYGLWKCVLPEEESGELAKPKIGFPETTEEELEEIVSEDSDCIYSSTPDVKA

SEQ ID NO: 27847 - protein, 361 aa, Homo sapiens
MATPAVPASAPPATPAPVPAAVPASAPASVPAPTPAPAAAPVPAAAPASSSDPAAASATTAAPGQTPASAQAPAQTPAPALPGPALPGPFPGGRVVRLHPVILASIVDSYERRNEGAARVIGTLLGTVDKHSVEVTNCFSVPHNESEDEVAVDMEFAKNMYELHKKVSPNELILGWYATGHDITEHSVLIHEYYSREAPNPIHLTVDTSLQNGRMSIKAYVSTLMGVPGRTMGVMFTPLTVKYAYYDTERIGVELIMKTCFSPNRVIGLLSDLQQVGGASARIQDALSTVLQYAEDVLSGKVSADNTVGRFLMSLVNRVPKIVPDDFETMLNSNINDLLMVTYLANLTQSQIALNEKLVNL

SEQ ID NO: 27848 - protein, 43 aa, Homo sapiens
VAPLRQTQTDIFFNPPSLISFQCSTCKEGERGRERKREREERN

SEQ ID NO: 27849 - protein, 24 aa, Homo sapiens
MSSQPGRRKSFFIWNNWEMKQEAL

SEQ ID NO: 27850 - protein, 38 aa, Homo sapiens
LRIPEGRHLSGIFCCCFGMTSIKIAFDENNWEMKQEAL

SEQ ID NO: 27851 - protein, 70 aa, Homo sapiens
LSFFFCFRFKCVFKILLMSIHWSPKYSYSRVLYSCITSKSVFTVFCVAIMFKLRKTQFLNYLGRVWILYF

SEQ ID NO: 27852 - protein, 11 aa, Homo sapiens
VCTSLGMEGNK

SEQ ID NO: 27853 - protein, 94 aa, Homo sapiens
LGRLLSLPTLPGPNWISAPGSSNFSKCEILSSVLEFSSAQTISATDRICENTSMSRLGIILRHHLASPASHFKMQSVHMRRDFPLSPSSVISLP

SEQ ID NO: 27854 - protein, 45 aa, Homo sapiens
VSPHCVFFSFYPKNGAVSTLAFLSPGWERGWCAEWFAFFSLELDA

SEQ ID NO: 27855 - protein, 50 aa, Homo sapiens
LGEVVYGYGAVHLGTCSSPGRLVTRCEMGRFCLLIYPCRAGRVVDEGGMI

SEQ ID NO: 27856 - protein, 19 aa, Homo sapiens
LYTLLKFVERLSSEKDFWK

SEQ ID NO: 27857 - protein, 132 aa, Homo sapiens
LQHLSGASRMCPACHTASRKQSVMQVFWPEPHKDHEGAGGARPVAAVPGVGAACPAAGAGCTRSGRNTHLPLAGRRDRGAAGVRPVPPRHLCAAAVPPRQPHDVWPVSTAPLHAVLELPRALPLLQRPLRGA

SEQ ID NO: 27858 - protein, 102 aa, Homo sapiens
VCKEIAIIPSKKLRNKIAGYVTHLMKWIQRGPVRGISIKLQEEERERRDNYVPEVSALDQEIIEVDPDTKEMLKLLDFGSLSNLQVTQPTVGMNFKMPRGPV

SEQ ID NO: 27859 - protein, 84 aa, Homo sapiens
LSPPPQGRGQRARIRAFRGSRALRAPPYPRGWRAAPEAPARLAVPRLPARASYSTRALNLSVTQALSPESLASWFKRNGRKGAM

SEQ ID NO: 27860 - protein, 118 aa, Homo sapiens
VAAGCGEGTASGEQSRRPWGLRPGARREGVWACAHVTGGEGRGQRARIRAFRGSRALRAPPYPRGWRAAPEAPARLAVPRLPARASYSTRALNLSVTQALSPESLASWFKRNGRKGAM

SEQ ID NO: 27861 - protein, 97 aa, Homo sapiens
LAAAPKQRPRPGEGQAGVQGRGQRARIRAFRGSRALRAPPYPRGWRAAPEAPARLAVPRLPARASYSTRALNLSVTQALSPESLASWFKRNGRKGAM

SEQ ID NO: 27862 - protein, 37 aa, Homo sapiens
VARRARARPRALPGTRAKTTAGARAAAPRSTRSPDRA

SEQ ID NO: 27863 - protein, 68 aa, Homo sapiens
LDAAALLSLLDACCHVAGPPPPAVAEPWGEDRQSLLCPPPGWSAVVRSRLTATSTFWVQAILLPQPPE

SEQ ID NO: 27864 - protein, 292 aa, Homo sapiens [sequence omitted]

SEQ ID NO: 27865 - protein, 160 aa, Homo sapiens
LTLCSKKDMKNFFDKLQQHSIPVFIFSAGISDVLEEVIRQAGVYHPNVKVVSNFMDFDETGVLKGFKGVLIHIFNKHDGALRNTEYFNQLKDNSNIILLGDSQGDLRMADGVANVEHILKVGYLNDRVDELLEKYMDSYDIVLVQDESLEVANSILQKIL

SEQ ID NO: 27866 - protein, 338 aa, Homo sapiens
LTDRNWDQEDEAEEVGTFSVASEEVLKNRAIKKAKRRNVGFESDSRGGFKSFKGLVVPSGGGRFPGFGSGAGGKPLEGLSNGNNITSAPPFTSAKAVAEPKVAFGSLAANGPTALVDKKVSNPKTNGDSQQPSSSGLASSKACVRNAYHKQLAALNCSVRDWIVKHVNTNPLCDLTPIFKDYEKYLANIEQQHGNSGRNSESESNKAAAETRSPSLVGSTKLQQESAFLFHGNKTEDTPDKKVELTSEKKTDPSSLGATSASFNFGKKVDSSVLGSLSSVPLTGFSFSPGNSSLFGKDITRVNQSLHHFALNHWRAKRKVTVVNAKVEMKKRIMSYPK

SEQ ID NO: 27867 - protein, 349 aa, Homo sapiens
LPRKCGRKAPCSLSSVPSSTLRMCPTEELIQDTTQRLFLLQVKEGILSDDIYCRPETAVLLASHAVQSKYGNFSKEVHKSGYLAGDELLPQRVLEQHKLSKDQWEERIQVWHEEHRGMLREDAVLEYLKIAQDLEMYGVNYFSIKKKKGSELWLGVDALGLNIYEQHDRLTPKIGFPWSEIRSISFNDKNFVIKPIDKRAPDFVFYAPWLQINKRILALCMGNRELYMRRRKPDTIEVQQMKARAREEKHQKQMERAMLENEKKREMAEKQKEKIEREKELMGRLKQIEEQTKKAQQELEEQTRRALELGKERKHAQSEAEKLAKELQEAEEAKEVLLQASRDQKKTQE

SEQ ID NO: 27868 - protein, 66 aa, Homo sapiens
LKFSGTHLLLPLKNQLQSVMSSLGSHQNKETGLKTLIPESILPHIQNEIHAQRCQEESRQTGLSRK

SEQ ID NO: 27869 - protein, 13 aa, Homo sapiens
LVTAVSTCGARRE

SEQ ID NO: 27870 - protein, 56 aa, Homo sapiens
LLNLRQLEGCSGSRHLACVQSAEASWRSRRRHCARITYQWPEVGFREAQEIGCEKP

SEQ ID NO: 27871 - protein, 57 aa, Homo sapiens
LLNLRQLEEGCSGSRHLACVQSAEASWRSRRRHCARITYQWPEVGFREAQEIGCEKP

SEQ ID NO: 27872 - protein, 12 aa, Homo sapiens
LKWRPRAATMAL

SEQ ID NO: 27873 - protein, 512 aa, Homo sapiens
MASASSQPSLAVGFSSFDPGAPSCTASSASGILSPTASEVPYASGMPIKKTGHRGVDSSGETTYKKTTSTALKGAIQLGITYTVGSLSTKPERDVLMQDFYVVESIFFPSEGSNLTPAHHYNAFRFKTYAPVAFRYFRELFGIPPDDYLCSLCSEPLIELCSSGASGSLFYVSSDDELIIKTLQHKEAEFLQKLLPGYYLNLSQNPRTLLPKFFGLYCVQTGGKNIRIVVMNNLLPRSVKMHIKYDLKGSTYKRRASQKEREKPLPTFKDLDFLQDIPDGLFLDADTYNALCKTLQRDCLVLQSFKIMDYSLWLSIHNIDHAQREPLSSDTLQVSIDTQRLAPQKALYSTAMEFIQGEARLGDTMEADDHMGGIPAQNSKGERLLLYIGIIDILQSYTFLKKLEHSWKAVVHDGDAVSVHRPGFYAERFQHFMCNAVFKKIPLKPSPSKKFRSGLSFSLHTGSSGNSCITYQPLVSEEHKSQVIKVQVEPGVHLGRSDVLPQTSESTFGGNQ

SEQ ID NO: 27874 - protein, 56 aa, Homo sapiens
LMSSADLKCVPSFPSPSHPWVTTEHPSQFPPTHGWLFSIVCFTRCPQNKQTEEGSG

SEQ ID NO: 27875 - protein, 97 aa, Homo sapiens
LSVPSFSPRISLNTLTLNVKSEKVYTRHGVPISVTGIAQVKLSEPFPHSPLPHHPLSQTLRHLLATVFSTLACREVPLLVSSFPGTPRHLPPPPFFP

SEQ ID NO: 27876 - protein, 76 aa, Homo sapiens
LPLPLLWLLRHTPQSRRDGGAGPGDPPASACTPPHARTCPLRAGDSPRSPTSAPARLPAAPAVTGPPRMQWRSPPG

SEQ ID NO: 27877 - protein, 127 aa, Homo sapiens
LGGSPELGQWSHPERAGGSGCGSVGPVCGTKILQIMTPKGALWGPGSDPCLDLSEVFAFSVPLQGSPLKSTEALASVHSSFGGPLRGGQSGCRGTSTLHGASGPSLWAQGLWPSPPSALWDLLSPVC

SEQ ID NO: 27878 - protein, 24 aa, Homo sapiens
VSGYCGLVSEQKMVAQAELRALIL

SEQ ID NO: 27879 - protein, 64 aa, Homo sapiens
VVMTVKTEAAKGTLTYSRMRGMVAILIGECRNLAGLLLQETQSGNFLKVPDQISVCGAGRYEAV

SEQ ID NO: 27880 - protein, 52 aa, Homo sapiens
VLERRRAKAAFCARPTPLPAPPGLREVGAGRRPPLPPPPHRSMKDELARESV

SEQ ID NO: 27881 - protein, 92 aa, Homo sapiens
VLERRRAKAAFCARPTPLPAPPGLREVGAGRRPPLPPPPHRSMKDELARGLFCLNPSTAGRLINHTENVEGFMGEGVEMWVFETKVYKQMNC

SEQ ID NO: 27882 - protein, 26 aa, Homo sapiens
VGAVAEVTVSKWKSLLSQQLLCKMPR

SEQ ID NO: 27883 - protein, 113 aa, Homo sapiens
LGPPGSLREEAGAGKEGSLGPAWGGRQEGPRAQCGPFFSLCATEPRARLLCEEDALTPSDLGSDGAEIAGPGLVARLVPHLGLCERPGAGSCRLHPREGRTGAKGCREAADFH

SEQ ID NO: 27884 - protein, 283 aa, Homo sapiens
LQRLHLLVQLHLDQRRLLDVFAQRADGRLSVVAQPRLLLKALLEPVDVFLQVVRVQLHLSLLVVHHLQGGAQLADLLVVRVAQLGVRGLLLPQRLDLRLNLLILLLQVVHLLYVAGKAVVQPLQLLLLVGAGQLVVAAGSGAAVEQGRGLAEVKAALGGAEHGRAVSEARGEHAALIGGGHGAGRAAGPRLRAEATGRGAADAAEARAGLGYPPVGGRVAQRVQRVAHLGGLGACGCHSVLPASPQPIYSRGAGPGPGPRPVEAAAEEAGTAGTGRGGGEGGG

SEQ ID NO: 27885 - protein, 27 aa, Homo sapiens
LNLSAVIGSFLQKRGKKNPPSQNGLSS

SEQ ID NO: 27886 - protein, 79 aa, Homo sapiens
LPSPSLPLLILSRSAALQCDESESSSHPARAFLLLPALFYFSFGRRRHCCTQLVSVPRFYPQVVPAAYGPGRLGYFCSR

SEQ ID NO: 27887 - protein, 66 aa, Homo sapiens
MVKINLSPLLMNITLWRTETQKGRFRMCDLYKIKPVSPDPNTFFEHLFLHLSKNFLLSWSSSEKSS

SEQ ID NO: 27888 - protein, 66 aa, Homo sapiens
LVLLASPLPYSPYFIPGSPRRKSSILQTRLFKNEKGRKESEVISLLYPPIRRLNVSFELKAAPLLF

SEQ ID NO: 27889 - protein, 498 aa, Homo sapiens
LAQFAFESDLHSLLQLDAPIPNAPPARWQRKAKKATGPAPSPMRAANRSHSASRTPGRTPGKSSSKVQTTPSKPGGDRYIPHRSAAQMEVASFLLSKENQPENSQTPTKKEHQKAWTLNLNGFDVEEAKILRLSGKPQNAPEGYQNRLKVLYSQKATPGSSRKTYHYIPSLPDHNLDAPEIRNDYYLNLVDWSSGNVLAVALDNSVYLWSASSGDILQLLQMEQTGKYVSSAAWIKEGNYLAVGISSAEVQLWDVQQQKRLRNMTIHSARVGSLSWNSYILSSGSHSGHIHHHDVRVAEHHVATLSGHSQEVCGLRWVPDGRHLASGGNDNLVKVWPSALGEGGWVPLQTFTLQGAVKAVAWCPWKSNVPATGGGTSDRHICIWNVCSGACLSAVDALSQVCSTLWSPHYKELISGHGFAQNQLVIWKYPTMAKVAELKGHTSRVLTLTMSPDGATVASAAADETPRLWHCFELDPVWRREREKASAAKSSFIHQGIR

SEQ ID NO: 27890 - protein, 474 aa, Homo sapiens
VTQKSSGPWAFSSCTYVSGPGVCISSLSCSRVGSSSFRGGLGGGYGGASGMGGIIAIMVNQSLLSPLNLEVDPNIQAVCTQEKEQIKTLNNKFASFIDKVWFLEQQNKVLETKWSLLQQQKMARSNMDNMLESYINNLRRQLETLGQEKLKLEAELGNMQGLGEDFKNKYEDEINKHTEVENEFVLIKKDVDEAYMNKAELESLLEGLTDEINFLRQLYEEEIRELQSQISDMSMVLSMDYSCSRDMDSIIPEVKVQYEEIANCSRAEAESMYQIKYEELQTLAGKYGDDLSRTKTEISEMNRNISWLQAETEGLKGQRASLEAAITDAEQRGELAVKDANAKLSELEAALQRAKQDMMGQLREYQELMNVGLTLDIEIATYRKLLEGEESRLESGMQNVSIHTKTTSSYAGGLSSAYGGLTSPGIIYRLGSSFGSAAGSSSFSRTSSTRAVVVRKIETHDGKLESESSDVLSK

SEQ ID NO: 27891 - protein, 107 aa, Homo sapiens
LRAPEAAVAGGPPDFSSRPVLERLTGPRPAASLSLALRGLGDWAAGLRVRGGGRLRPGASWPREPRDGGPGRGGGAAGVSLGGEGAAGPARFPARKLREAWTSAHWR

SEQ ID NO: 27892 - protein, 28 aa, Homo sapiens
VVLPGKATLGSWGDAKHPRYWIMGWGNR

SEQ ID NO: 27893 - protein, 131 aa, Homo sapiens
LRHRFFLAAVAACGGGLPTAALCSLRLSPAGSVNAAVAALCTQPRSPLLQSGSQSLSTIFYPRAAWIVVPSVRTPLLGPTTAASDISVSLFLWRFGLPISVVATLGVYGPLKNGRVREPQGAVRIQSRRGW

SEQ ID NO: 27894 - protein, 281 aa, Homo sapiens
LHSLSSHPYFPPSLSTTDLCSVSMDSPVPDNSRKWNNTIDAFYHGFLSLRMFCRVIHIACIRTSFFFFFFLRWSFILLAQAGVQWCSLSSLQPLPSRFKRFSCLGFPSSQDYRRLAPCPATFFVFLVETGFHHVGQAGLKLLTSGDPPASASQRAGITGVSHHGQPSFIFMEKNISLYEYTTFCLSIYPLIGCFYFFLAIMNNIAVNICVQGFSGHKFLFFLGIYLGVELLGHIVILFNFLKNFPTVLHGGCAIVYSYQQCMKLQISPHPENPFIIFCFSF

SEQ ID NO: 27895 - protein, 181 aa, Homo sapiens
LTALKHYDKAKELDPSNMTYITNQAAVYFEKGDYNKCWELCEKSIEVGRENREDYLQIAKVCARIGNSYFKEEKYKDAIHFYNKSLAEHRTPDVLKKCQQAEKILKEQERLAYINPDLALEEKNKGNECFQKGDYPHAMKHYTEAIKRNPKDAKLYSNRAACYTKLLDSSWHSRTVKNVSS

SEQ ID NO: 27896 - protein, 140 aa, Homo sapiens
LDLATSKSLMTLPRLIMVFPMLTLQEARHLLLCPTLSRPPSCVKANLVTWRSHRGRNADFLGHGTRTPSLSELRKSPAPFWRATWGFEKRTDQKAAASRRLPPSPLCQDLDAWPKCPTHRRLAGSQPHTSAAFCFPGQGF

SEQ ID NO: 27897 - protein, 250 aa, Homo sapiens
VGEKDRGDRDTAGPGSLSSLNRAVVQHTHGMNMEQSLQETVLLWGRGRTSTSLSQDKTTREKQIPPDKPEVQTQPPLRKRLREPTSEAAEAQRKTAASQALVATSSPATSQWKGTWCRWVRGLPAPREPSARTPHQHTRTHAHTQTRAHTRAHTQIHTRAHMHPHTNTHPHMHPQTHAHTHRPHMDTQTQAHTNTRARRHRRARTAAAARRGLTPLGRSVKEPPHSPERKFLGAAEKGRCRDPDVSGFDT

SEQ ID NO: 27898 - protein, 20 aa, Homo sapiens
VPASPSPFAMIGAKFVILIH

SEQ ID NO: 27899 - protein, 39 aa, Homo sapiens
MQGLFHTGFKVSFIFINEESYLGARKMSEVKGLTKDFLQ

SEQ ID NO: 27900 - protein, 51 aa, Homo sapiens
LTGWTFNGHFWDPEETSSLQAYCLSVKFQSKEPCSSKGIQEFRRASPTPVR

SEQ ID NO: 27901 - protein, 243 aa, Homo sapiens
MGSITTVTVNQSLLSPLNLEVDPNIQAMRTQEKKQIKTLNNKFASFINKEQQNKMLETKWSLQHRRCLGATWTTCSTATSTFGSSWRLGQEKLKLKAGLGNMQGLVEDFKNKYQDEINKLTKMENEFVLIEKDVDEAYTNKVEIESHLERLTDEISFLRQLSEEEIWELQSQISDTSVVLSIDNSLPQTWTASLLKSRGSTRSLPTAAGLRLRACTRSSMRICRCWQRSTGMTCSIQRLRSPR

SEQ ID NO: 27902 - protein, 330 aa, Homo sapiens
LLLVCGGAFLPSLHWALDLHGQEAPRPRLFANSNRLLAGPRQGGLGRKSSLLYLHCTQRPVRGVPDRTPSSLVKCPCSSLVSTPWIFPPQKYNADYDLSARQGADTLAFMSLLEEKLLPVLVHTFWIDTKNYVEVTRKWYAEAMPFPLNFFLPGRMQRQYMERLQLLTGEHRPEDEEELEKELYREARECLTLLSQRLGSQKFFFGDAPASLDAFVFSYLALLLQAKLPSGKLQVHLRGLHNLCAYCTHILSLYFPWDGAEVPPQRQTPAGPETEEEPYRRRNQILSVLAGLAAMVGYALLSGIVSIQRATPARAPGTRTLGMAEEDEEE

SEQ ID NO: 27903 - protein, 54 aa, Homo sapiens
VQKKSGRERRRPPLPCTALLEATWRVRPRGGHGHKCPQLAPGKSKAQDDLSSFH

SEQ ID NO: 27904 - protein, 22 aa, Homo sapiens
MLCSFLHIKSTQACSTYLVYTV

SEQ ID NO: 27905 - protein, 30 aa, Homo sapiens
LSPLNSGCGPEVCAGPGLTRRAHFLGMRIP

SEQ ID NO: 27906 - protein, 26 aa, Homo sapiens
MLVPEPMNASRHPSFPGVKVFRCCIF

SEQ ID NO: 27907 - protein, 8 aa, Homo sapiens
MELADGAP

SEQ ID NO: 27908 - protein, 17 aa, Homo sapiens
MSIGEMAGSYSFFPPPP

SEQ ID NO: 27909 - protein, 9 aa, Homo sapiens
MLEVPLGFS

SEQ ID NO: 27910 - protein, 13 aa, Homo sapiens
LRGLLGGNAKILC

SEQ ID NO: 27911 - protein, 20 aa, Homo sapiens
LNYSIIEMRIYTQNDPVLFS

SEQ ID NO: 27912 - protein, 46 aa, Homo sapiens [sequence omitted]

SEQ ID NO: 27913 - protein, 31 aa, Homo sapiens
LEGPRHQGSEGPGTGRTQQCPALQSELPDSL

SEQ ID NO: 27914 - protein, 36 aa, Homo sapiens
LAENLEVTTVQRIKVKILCQRANELFLLLRKPTLLT

SEQ ID NO: 27915 - protein, 94 aa, Homo sapiens
LMGLYHGQVLCKKNKFGAPQKDVKRLAILGEGLKGAGITQVSVDKRLKTILKDATLTRLGQGQQQVFKGLNDKVNKKALTSFVRDSIFSNLTAA

SEQ ID NO: 27916 - protein, 120 aa, Homo sapiens
LPGDPAGRDRCCVMQPLRGTESRNQGWGSRGVRRSWGLGLGACVSQACFFVVVLFFCRNIFLILGGVGAGVVCISRPPPWWSGCVEGRAQFLDLAHSPPTPPLSFFFEMESRSVAQAGVQ

SEQ ID NO: 27917 - protein, 85 aa, Homo sapiens
VGSGEREPRVTDGGERKEGRLYFFKAPKSLMFTRPEMPRPRPGREKAEMEDRRLPYKYAHWREKCCNLNQQLHPSSLGPKPVPTW

SEQ ID NO: 27918 - protein, 20 aa, Homo sapiens
VGSGEREPRVTDGGERPQRV

SEQ ID NO: 27919 - protein, 251 aa, Homo sapiens
VLQCRLIELTVLDKCRLMFFIGSFLKFMGKTNEAEELFLSVEDMLVQSQSMTDMLLKVQNAIGELYLETGMTQEGFQYFQKAWSSMLRLSLSDLEDSRDLVKQKVRVLDNLAKSASEEYLKENHILEYATEISNLLDNNPRDQATMKYIEGVLMFVAGNTSLAKMKLRECLNIRKSLFGKKNMLVGEVMEFLADLLFFPQRDSKKSQRKQVLKYYKQVIKIKENAETLAKSSLLRKQLSISLSDTLCKLAF

SEQ ID NO: 27920 - protein, 194 aa, Homo sapiens
VGWGVPTGPRPPRPPRPPAQLRSRSPGAPPEGPRRTPPPCVLRPPRPSRTPWRGNKGAGTPPSAGAVGEGGPDRREARSPTEAGRRVWDAVGSAKGWLRAAGAAGCGPGLLGDRPCLAGKRDQETTRKRLDLEQGRLPHSLPEPAEGAKDFRAVSSGIRETLAFQGSTLYRRRLYREGVFAAWMAIPHSFNGGL

SEQ ID NO: 27921 - protein, 260 aa, Homo sapiens [sequence omitted]

SEQ ID NO: 27922 - protein, 117 aa, Homo sapiens
VAAGEGRPPRRARGSGRRRAVRPSGWGRDAMQLAGPRGAAGCRGPAPVLRGVWGPVWPAWLSRLPSDLGAPETHTWGSAVSAGRTGALLEHPRPHPSIDRCPLSASSSAPASFRYCF

SEQ ID NO: 27923 - protein, 106 aa, Homo sapiens
MKAPWSPGFGVALHPWCTPCWWMAQDGAVAMGGAGLLEGRWSILPSNKGHVESWFQCGLVSTVHPVLVGGSGRTLISSAPSWCHWHGRKALVQEGWSSSCVIFEMP

SEQ ID NO: 27924 - protein, 29 aa, Homo sapiens
LRKKKNQDLGGITYKDVRCVNLGASWILP

SEQ ID NO: 27925 - protein, 111 aa, Homo sapiens
VEKQGGELTEHCCILQCGGGKKLESAWEFMLMQLTPWAKQHFLLRRYWALGNSLMFWWIMDQIQITAALMGAPLSMQQHFRAISGSLANCWMQEVTCDSTMRGVKTRRLGL

SEQ ID NO: 27926 - protein, 59 aa, Homo sapiens
LYLLKEQEFPSISWTKTEAPGAYRKELEVPSAGWEASFIEVTSLDAGLAEVGENAASLE

SEQ ID NO: 27927 - protein, 185 aa, Homo sapiens
VGFAGSFPKESLPRSDARNLEELGLYRGLMEERLFESEGHQHGEILTQVLDDMLKKKTGVESCERNVCEVSMGHLSLNKHTRADTGHKPYEYQEYGQTPYKCTYCKKAFSCLPYFCRHVIAHTGEKPYECKDSAKTFSFSIYFHSHKRAHSGGNPYECKQSGKPFGCASELQMHARTQCGETLQM

SEQ ID NO: 27928 - protein, 92 aa, Homo sapiens
LRGACPGEVGSCRPAGPGPERARRGCPGGQGVGAAPFPSGVVRGNEGNRRCGDVLGEKKKKTKIYMGEINFFFSLNQVQCIREFSYLCMLRD

SEQ ID NO: 27929 - protein, 25 aa, Homo sapiens
LGQKSKTLRLATIRSLPMVSSSLLS

SEQ ID NO: 27930 - protein, 30 aa, Homo sapiens
MDNSTRIWGQFHIFGNQTSIQDNTKYVVCC

SEQ ID NO: 27931 - protein, 31 aa, Homo sapiens
MDNSTRIWGQFHIFGNQTSIQDNTKICNQNY

SEQ ID NO: 27932 - protein, 106 aa, Homo sapiens
VRAAPGQGPAAGGRREAAPGRQGRSQRDPSSPRAPGAAFSAQLTFSTSPAGPEAGNHLSPLVSVSLSLSGSLSPSLSGSLVSLSLGLCPPPPGFLSPLSESVPLPP

SEQ ID NO: 27933 - protein, 99 aa, Homo sapiens
MTGWSLLFKFQIDIPDKRCLSPCLSSDLHSTVPGKVEPPASPCPGGWKCKRKVSARSFFSESSLLGLQMAACSWHSLFSTHAQSYGGPSNHLLQPLETS

SEQ ID NO: 27934 - protein, 113 aa, Homo sapiens
LEKHPWSRRWQFTEFESLFMSHSLKSLEEVCADLIRGAKERNLKVKGPVQMPTKTSRIATRKTPFGEGSKTWDHFQMRIHKQLIDLHSPSEIKQITSISMEPGVEVEVIIGDA

SEQ ID NO: 27935 - protein, 160 aa, Homo sapiens
LLDALAAASPLPAAARPKSPSTPLGARPPQHSGPAVCPSSPRSCTLVPSPSSHAPAARAVLRLSPKSCTPCRSCPPLCLVRPSLPAADPHAPPLPAPQRRASPLPSCAAASSSPCQELKRSCGTSLADLVSPPAAEAAGPLPWTATRRASGGAGIWLRVG

SEQ ID NO: 27936 - protein, 73 aa, Homo sapiens
LPGQGRGERAERLLSDRVFLKYTGKNGGKNTGVFPPHWKEGSAVNNGAIKKAFSQPPHQPRTFLAQQDLLARF

SEQ ID NO: 27937 - protein, 78 aa, Homo sapiens
VGSYLSTGLHIVIYRHINLFFFFVFFFLPFFQRFALTFQSSSYRGIEELPHSGKTEKTHILLIQPVIAFLPASRQSFP

SEQ ID NO: 27938 - protein, 139 aa, Homo sapiens
LVLEEWPPVGSHAADLGGGFALLWGSSIYFVFSKTNFPLCLEKRRHPEALEGSLAARLAQALQRQPFHRAQRRPFEALSGGSEGDLVGNWGSSAQAGLGCMRTALWDPRETPWLSPPHRGGGPSAMAAIWLLPCDPVTP

SEQ ID NO: 27939 - protein, 209 aa, Homo sapiens
LEHSDCAFIVDSEAIYLNIECPNYTNLNHLIGHIVSSITASLRFDGALNIDLTEFQTNLVPYTHIHFPLAMCAPVISAEKAYHERFSVVEITNAYFEPANQMVRCDPHHGKYITCSLLYPGDVVPKDFSAATDTIKNKCSIQFVDCCPSSFKVGISYQLPTVVPVGDPAKGQRAVCILSNITAIAEVWAHLDRKFYLMYAKFLCSVFRG

SEQ ID NO: 27940 - protein, 187 aa, Homo sapiens
MAGAPWRHLFPPCEGRSPRLGLLKVVFVVFASLCAWYSGYLLAELIPDAPLSSAAYSIRSIGERPVLKAPVPKRQKCDHWTPCPSDTYAYRLLSGGGRSKYAKICFEDNLLMGEQLGNVARGINIAIVNYVTGNVTATRCFDMYEGGKKIFSVKIQMNFKQKIKIKKHKEKCQPFLFCLLEKRQQLS

SEQ ID NO: 27941 - protein, 116 aa, Homo sapiens
LRRCAPGFAATKTQRVQRRPPRRFENMAKRNAEKELTDRNWDQEDEAEEVGTFSMASEEVLKNRAIKKAKRRNVGFEVSAPLQLLLLNTHLISGLHSNPSAGSNDINKCFLKILIL

SEQ ID NO: 27942 - protein, 127 aa, Homo sapiens
LWRTGQRGGQQAQSPQGRRTRSRDVLWAVALCGPVPTMSLEAPPPWGSQSPLPSLLSLGTLLPFPPALILLSDMAQAFLPGPCLARLAEGTLLLCTLGTRAGLALPMPPSHPHGALASSKHPPWWMD

SEQ ID NO: 27943 - protein, 138 aa, Homo sapiens
LVRNLWIHLACQVLLFAVPSRLQKHLWCFSFWIYMQETYICLYTDRIIYKYIYACPRAWFSSLLPTKRNVLEPMDNKNTINILLSLFFKRGREREELFNIWPSFGCTLSTTKYLWLQIRCKRGLERKDIDLQLTGFDL

SEQ ID NO: 27944 - protein, 24 aa, Homo sapiens
VPGYSCFHVRCSSGVITYPTGCPW

SEQ ID NO: 27945 - protein, 209 aa, Homo sapiens
LEKSQDDKRDHKNSASAEWIGSTTEGKNLLKKEDHTDGSGPSTNTASWKLKSPSQKQDEGTAPVAAASPKLCLAWQGMLLLKNSNFPSNIPTCSCCRVTSKWLAVFLWRAKVAQLRITQCLCLDQPKLDEVTRCIKVAGPNGYAILLAVPGSSDSRSPSSSDTVTSTKRLLRSLVSYLKQKQVPRVISLVRGAQQRQGKRRDPSCLPTL

SEQ ID NO: 27946 - protein, 121 aa, Homo sapiens
LGLTHMPLRKRSGCSHACKAHKVDGRNTEPKRAASREDSQRPGAHLTVKKILAGGFKEDTEEHHLRDYFEQYGEIEVIEIMTDRSSGNKRGFAFVTFDDHDSVDKIVIQKYHPVGMATTLK

SEQ ID NO: 27947 - protein, 49 aa, Homo sapiens
LEPNSEKAIHRKGNDQLPEFPKWQRTGPAVRAPGDAVRNRIRSDPLLGV

SEQ ID NO: 27948 - protein, 77 aa, Homo sapiens [sequence omitted]

SEQ ID NO: 27949 - protein, 47 aa, Homo sapiens
LQTHLPRSRGGGGDGLGTLGRKMGGMWNAALPGPTSGGRAEVAAVDG

SEQ ID NO: 27950 - protein, 140 aa, Homo sapiens
LRFTRINHFPSSKQVFKYFTASGCGMQGSKARAKAKTHSSRAGLQFSVGRVHRLLRKGNYAKRVRAGAPVYLEAVLEYLTAKILELAGNAARDKKTRVTPRRLQLAIHDEKLNKLLGKVTIAQGGVLPNIQAVLLPCLYK

SEQ ID NO: 27951 - protein, 98 aa, Homo sapiens
LTEAGWVQGRGGGEGPARAAPVGVAPPFPPQSHGEPGLWRGALGAGSLHSPAAAAGDKPPRPRGPELLPLATQDAGSGERTGCPVAGSGAATAWPGLV

SEQ ID NO: 27952 - protein, 69 aa, Homo sapiens
LFTYPKSGTHGGGGKGVWLRSRTRSLHSPRGGQGADQGKSAPGQRLTTLHSEVRVVPLSPETQRVLEAP

SEQ ID NO: 27953 - protein, 188 aa, Homo sapiens
LTHLLPRLCHLLLSPASVVAVCTGLSPLLVLRWFPWPGGPAQGDGCYSLLGQPLEYNLSICPPLLHDQSTYTVHQGQSGLKHENQGKRQALKSAFSDMGTADVVLGQGPEVTDLPKGITCTEADKLFKQLAMSSAKTQLRGCLVGVEGTMVGLLRMATAWTLLPFTPSWLCSLTCWLLKMPPFISTTP

SEQ ID NO: 27954 - protein, 113 aa, Homo sapiens
LKARTQPHDCHGNAGPGTLFFFFCIKSRERLKRGTRMKGGTEPVWPARGWCLLGKDRSTRGTGLVRPEEPAEGPLRNKFVILHGQSFRKSSALLTDDKRGRATKFSQEIRSRF

SEQ ID NO: 27955 - protein, 107 aa, Homo sapiens
VPAHLGPQPDLSPSQALSERGWLLSGQWRMVAGDGVGRSRSRPLWRPWQWLSPSPGRWGHQSGRPQALGNRLPSSLCLWVAEASQPISSSLQQRPSVSVLQWWPFRG

SEQ ID NO: 27956 - protein, 26 aa, Homo sapiens
LGYLGLSAVAELNMILHCSCLFEADP

SEQ ID NO: 27957 - protein, 33 aa, Homo sapiens
MKTPGLFHFSQELMFIDCASAFHVTIVEFVLVL

SEQ ID NO: 27958 - protein, 17 aa, Homo sapiens
LAGLSNPGNNSLHLIKT

SEQ ID NO: 27959 - protein, 29 aa, Homo sapiens
LTLSHLGSQLPTEVLLPLPKIPASSLNPN

SEQ ID NO: 27960 - protein, 11 aa, Homo sapiens
MLQQNYPPDRH

SEQ ID NO: 27961 - protein, 29 aa, Homo sapiens
MCILSGNKIISLSAPASSPVLCSQDSIIQ

SEQ ID NO: 27962 - protein, 77 aa, Homo sapiens [sequence omitted]

SEQ ID NO: 27963 - protein, 29 aa, Homo sapiens
LWRHGQICPPDHSCLQCRKPTIKGKQKCS

SEQ ID NO: 27964 - protein, 16 aa, Homo sapiens
VFLGVLLSLWIEPVKP

SEQ ID NO: 27965 - protein, 35 aa, Homo sapiens
LDPDFHALSTLTPVHAQTPIFVAPGIASVALCPLL

SEQ ID NO: 27966 - protein, 142 aa, Homo sapiens
LSTWLAAASQDYLITLAKEENKRSQHRASLHACATGPPPPAHPPDPCLPSFRGPPEAGLTRRGDGAPGAPRLRDGGSKEAERHSDPAPALLCSQAAVLLHPCGFRRGAGALLTSDGISEYLIAIKRQPCFVLSVLFEGKAWL

SEQ ID NO: 27967 - protein, 205 aa, Homo sapiens
LRDRVGGGSSASTGGRKRRGWLVTRGWGGPRALGGCGEGESRQRAAGSSMEPAAGSSMEPSADWLATAAARGRVEEVRALLEAGALPNAPNSYGRRPIQVMMMGSARVAELLLLHGAEPNCADPATLTRPVHDAAREGFLDTLVVLHRAGARLDVRDAWGRLPVDLAEELGHRDVARYLRAAAGGTRGSNHARIDAAEGPSDIPD

SEQ ID NO: 27968 - protein, 72 aa, Homo sapiens
LERYRGPSRGFEGQGRRGLFRQHRRKKEEGLAGHQRVGRTACARRLRRGGEQAAGGGEQHGAGGGEQHGAFG

SEQ ID NO: 27969 - protein, 156 aa, Homo sapiens
LLCPWTLDFSASITGACAAVFTVIGSEKQSECSLLRESRAKYHGCTHGQISSSLKQQPRWMYSHQEDLKVWSLVEKKEAELHRLPSGFQCSLVIGGTSRRLEGEKRQVGAFLPPAKFSSCLTAHFSQLQTSLGCGHPDLSPGPFLVLGVLTASCYC

SEQ ID NO: 27970 - protein, 151 aa, Homo sapiens
MPRGSRSRTSRMAPPASRAPQMRAAPRPAPVAQPPAAAPPSAVGSSAAAPRQPGLMAQMATTAAGVAVGSAVGHTQGHAVTGGFSGGSNAEPARPDIAYQEPQGTQPAQQQQPCFYGIKQFLECAQNQGDIKLCEDFSKVLKQCRLAKGLA

SEQ ID NO: 27971 - protein, 73 aa, Homo sapiens
LATEICIEESGPFGVHPSGHPAARHAHKPALRMVRPGAQARGKHRPRPPSSQPLHHPQPGVPHGQLWPRRSQG

SEQ ID NO: 27972 - protein, 61 aa, Homo sapiens
VRLASVSPRAPASFLLPSCLRPRPFIIRVPVKAFPKSEPEWFSPGRLLWGAGGMRNTLDTG

SEQ ID NO: 27973 - protein, 43 aa, Homo sapiens
MVVSRGKDQNGSQMIVGQQVAEEEFLPSSRGTPTPWLMLGCHL

SEQ ID NO: 27974 - protein, 71 aa, Homo sapiens
LHCTVAMGSAPGLLGVDMVVSRGKDQNGSQMIVGQQVAEEEFLPSSRGTPTPWLMLGMSKDRPSSGSSLPY

SEQ ID NO: 27975 - protein, 68 aa, Homo sapiens
LLGVDMVVSRGKDQNGSQMIVGQQVAEEEFLPSSRGTPTPWLMLGSDFDLYLSFGCQSYSLILWFASV

SEQ ID NO: 27976 - protein, 84 aa, Homo sapiens
LHAATPSPQPSPRQEPLLSPLPSGPLTYPRPSALSLHFSVVLVFVPGIALQLPAAGVGAGASLTRKCLEVSSTLAIPGIPPLLI

SEQ ID NO: 27977 - protein, 152 aa, Homo sapiens
LLPCEEGACFFFAFCHDCHVNRTPGTVQGPPVWPHAVTLSKGVTTEVHGKAERCDVLEDAGGKHAQRTGAITRLRAAAENLAWATVVSSVEGAEEHGHRLLLPAGTGHLLLQSESIWIILDKSHLEILHQITSAMTCSPNKALCTGSGGHIL

SEQ ID NO: 27978 - protein, 138 aa, Homo sapiens
LALAPERWISAQSWNTCSPAIMKAAKGQHKSQLETRKLRPKSEATGPRAHSQPPPDWDKAMQRASAPFLLDFKDAWFLCPISIQPSLLHLGLDIFARDRSCDCAFTAVSPAPSTGPATQMVGEGGARNGSQAPRDPGG

SEQ ID NO: 27979 - protein, 193 aa, Homo sapiens
LERTAERWDGFIVQDQLDVLRAWRSPLHEDLSPLAAQVTVWSCWRRLLRAVAAPPDTWPRGLHRSARERPTGVCSWLGCGPIRLFGSQALAHRRPEEARRPGASSPSLSLQPRCVQARGPPRLLHWHCWVWAAKPTCPPASSAAARPAVGGCTLCCSLDGLGPRGSLPNHETPSPQLRLLQWSRAPTQPQERV

SEQ ID NO: 27980 - protein, 39 aa, Homo sapiens
LNPALIEARKPRDSYQPMPGPFSRTTRNCHSPGATLASG

SEQ ID NO: 27981 - protein, 280 aa, Homo sapiens
MALNLEHQLPRTRVSSSTALNLEHQLPPTRVSSSTALKLEHQLPAGYPVARPSNWNISSPPGLQLHGPHTGTSAPHQISSCTALKQEHQLPTGSPAARPSNCNIGSPLGLQLHRVNLELQLPPGSPAPWPSTCNTGSPPGLQMHSPQTGTSTPHRVYSCMALNWNISSLPRSPHAQPSNWNISSPPGLQEHGPQTGTSAPCQVTSCMALKLGHHLPTRSPAAWPSNCNISSHQSLQLHGHQTGTSAPRPSNRNISSPPDLQLHSRQHQLLPESSAARPSS

SEQ ID NO: 27982 - protein, 208 aa, Homo sapiens
LREGSQGPVRNRAQRWWAGTAGGSSTPSAAAGLGAKPLIARGRQGRPAAPSAGPAKPTPTRNSSWPASAARRPGSRSRLSLHTSLEAEGAGSGLGQPRKGLSQCSGALKASSSATKVGAQAEEARRASEGCEDCQHAVTSHQQQSCQAPVGRIAAALETMYNGHGGVGDDPPATFTPRWLVPRARSPRDPQLSGELQVPCACQSQCPL

SEQ ID NO: 27983 - protein, 90 aa, Homo sapiens
LERLLWGSESRDQTLTHLLPFLQPTLVCPHAFPGLLHVGCTQVLSPAVPPAGVRSCVSSPPQEGRGLLQALLCVAWQDTLSNQLPTSTPL

SEQ ID NO: 27984 - protein, 79 aa, Homo sapiens
LLFSTLPWVRGRVERTAPSPGAPTTHPALPWAKWPIWDRDRDFELLLLKRLHAWIPCPHYLKFSSELGSLTQSLYLILA

SEQ ID NO: 27985 - protein, 18 aa, Homo sapiens
MQPLVQEGRLFLRTGRGF

SEQ ID NO: 27986 - protein, 86 aa, Homo sapiens
LGNPSLEVPGPELPEGWVRGLGGVRFGFLGHSGAAAQAAGAEPSPAPSATSPGTPSLLLDNTPPPPGPPSPKPPSFVQRQILRTHP

SEQ ID NO: 27987 - protein, 8 aa, Homo sapiens
MCLLPLVP

SEQ ID NO: 27988 - protein, 68 aa, Homo sapiens
LPSAADKVNNSPKTSQRGSDDQPSQWPRKVNGLLSLALSACELHLGPKLTDCAEATLSRRSLLVLLTS

SEQ ID NO: 27989 - protein, 14 aa, Homo sapiens
MKNKLRQVLEKYRR

SEQ ID NO: 27990 - protein, 13 aa, Homo sapiens
LKLLRADCQVLEK

SEQ ID NO: 27991 - protein, 39 aa, Homo sapiens
VLIFKSCGVLKYQPWHFLLTPSLGDFRIEKFFHRAFLKL

SEQ ID NO: 27992 - protein, 21 aa, Homo sapiens
LKGRERGKAGNHFSLAFPEAC

SEQ ID NO: 27993 - protein, 68 aa, Homo sapiens
MVKEIEISQHTKYTCSFCGKTKMKRRAVKIRHCNSCMKTVAGSAWTYNTTSAVMVKSAIRRLKELKDQ

SEQ ID NO: 27994 - protein, 43 aa, Homo sapiens
VVVIGGGNEYTHLVDLNPDIQQLSIHIWKRLHSHLLSLTPGIT

SEQ ID NO: 27995 - protein, 20 aa, Homo sapiens
LISNYAMVFTCHEHSFLPEF

SEQ ID NO: 27996 - protein, 198 aa, Homo sapiens
LRGGPCSRCLTSGSSCWPVLGWKLSAWWSFPVVRSCAQSRDPSRQHLPLVICSGISNQPLEFTFQKRDLPQMMDEVGRILCNLCGVVSGGVVCFFSSYEYLRQVHAHWEKGGLLGRLAARKKIFQEPKSAHQVEQVLLAYSRCIQACGQERGQVTEALLLSVVGGKMSEGINFSDNLGRSDQPAGGRGSAALGLALRE

SEQ ID NO: 27997 - protein, 114 aa, Homo sapiens
LPCAESQRNTFQFFSIDYDSSGLFTVGFTVLRRRSDGREDRKKEPTMKQKLRLTLSSPFLSWTCPKLEAGGGWSAGMLQKSHGRAPGVHHMCTLLHDQVGTLHVGNDQRMVGDA

SEQ ID NO: 27998 - protein, 138 aa, Homo sapiens
LPCAESQRNTFQFFSIDYDSSGLFTVGFTVLRRRSDGREDRKKEPTMKQKLRLTLSSPFLSWTCPKLEAGGGWSAGMLQKSHGRAPGVHHMCTLLHDQEPSERAERKFTSASTMDLPTLDMFSRFIHVMAYTRTSFLL

SEQ ID NO: 27999 - protein, 55 aa, Homo sapiens
LLYALPHLFRFPDAGNGGEQLQSLGSLYHLPHEPQHVSGCDSLLHRFKTISGSSH

SEQ ID NO: 28000 - protein, 73 aa, Homo sapiens
LLRAQSPGTWTRGSDEEELRAAPEPCQPADLRRWTSAIAVWTVTGSLCGAVLPLLTQRSCFHFKPVFWGCSKK

SEQ ID NO: 28001 - protein, 139 aa, Homo sapiens
VGLRLPRCLHPSRPSLGPPRRQASILSVPTPAVPCPGSWHKSTRPGSLGQLLENRDCYPILPMQAGSCQPRSDPCPPRLCLGRRLTLEEWALESCPSQKPPGWDFSGCQGRPRPQEEGEAPGLSGISPRTQAQPQVDGG

SEQ ID NO: 28002 - protein, 317 aa, Homo sapiens [sequence omitted]

SEQ ID NO: 28003 - protein, 88 aa, Homo sapiens
LAPLSWLCSSRGYSPIPPPSSLVGRATDGTQGSGRASLPKPMPFSSLFPQAPGCLSAPKEKPHGVDIGPFCHLCSSCCQGLTTECRGD

SEQ ID NO: 28004 - protein, 139 aa, Homo sapiens
LSHCTQPRQQSETLSQNKTEITKNKVTCWRPHGCEPNTGLGYQGSHTSKYTLLPWNLLKTKPLPPSHGKEGGKEAKVPSGDNSGRGEVPRAQEGQAACGRAASGDSQEGMRRGYEERATAQRPAVRSAETTAHGTWIYP

SEQ ID NO: 28005 - protein, 197 aa, Homo sapiens
LLARGSASQPTPNPTVWGEKQNLCFPSLLAPDNQHVRPFPLHHSDSCPLWGTWGRLWLPGSVPYFSAFLGHRGLLDAPQAFCAQASVPSGEVAVSEGEEVICSPSPSAHLQHLLPLPWPCRAFSSSLWLVPGHPSCPGSLLPNCKMPAASSSFVPDPQAVPSRLSSADPPEWRRPLHEEGSSPRHLSSDPPAASAQV

SEQ ID NO: 28006 - protein, 9 aa, Homo sapiens
VAVALKTVM

SEQ ID NO: 28007 - protein, 76 aa, Homo sapiens
LSPRLGVQWHDLCNLYLPGSSNSCASASQVTGTTGARYHTWLIFFVLVETGFQPCCPGWSQTPELRQSTRLGLPKC

SEQ ID NO: 28008 - protein, 222 aa, Homo sapiens
LCEEGDAMIMAETGKIFKKVKEMKKSIAFPTSILVNNCVGHFSPLKSDKDCILKEGNLVKIDLGVQVDGFIANVTHTFVVDVAQGIQITRQKADVIKAAHLCVEAALCLVKPGNHNTQVTEAWNKVGHSFNCMPVEDMLSHQLKQHVIDGEKTVTQNPADQQKKDHEKAEFDVFISIGEGKAKDAGLLFTKETPLNNMDYKCKLHVPSSARWKGVLMLCCLL

SEQ ID NO: 28009 - protein, 35 aa, Homo sapiens
LMGSLPYAFVLVLQKGNLTEDHAVLKKYNITEEVD

SEQ ID NO: 28010 - protein, 51 aa, Homo sapiens
VSGTQIQMPSPSVRPSVHPSTCPPGRWVGPPCSSYKRGGGGDFWWARAPGL

SEQ ID NO: 28011 - protein, 235 aa, Homo sapiens
LGWIQSYEANLRTTAHLGNVYSVCIRICLASEAPQGPENDWDLSEHALPRWSTSPVIGSPPVRAVPIGTPPKQMAVPSFTQQSLWPVHVRPPMPPCYPGPYDERMPPNQLYSVLNSSLLGHPFPPSVPPVLSPFQRAQLLGGAQLQPGQMSPSQFAWVPGFVGSLHAAMNPKLLQGQVGQMLPPAPGFHAFFSAPPSATPPPQQRPPGPGPHLQNLRSQVPVFRLDATPLHPQHH

SEQ ID NO: 28012 - protein, 56 aa, Homo sapiens
MSSATLVKASCLLHSTFLFKSWTSLRMSTSGRKEATGAEGGEDKIWSKILKEATRS

SEQ ID NO: 28013 - protein, 45 aa, Homo sapiens
MHFTQGPVGWYRLGKRKGTKAASIGNHYLLILLTHRNSKNLVQQC

SEQ ID NO: 28014 - protein, 8 aa, Homo sapiens
MSSVLEDN

SEQ ID NO: 28015 - protein, 87 aa, Homo sapiens
LALRKVGCGAGRPSPRVFRGALFLEELGEGGCLTISATDRICENTSMSRLGIILRHHLASPASHFKMQSVHMRRDFPLSPSSVISLP

SEQ ID NO: 28016 - protein, 39 aa, Homo sapiens
LSEFPLWKKKLLFNLPKCLTHSLQINQPTYTALSRPNFR

SEQ ID NO: 28017 - protein, 128 aa, Homo sapiens
LGGVRRGGGSRESPGVWAGVSRGPSGRIAAPEGGRPAGLQSPGRSGRLRALGGRLRGVPALQPQRPPRAAVPGAGKSRAGAVASGAGRGGGGGAGGRAESPPPGRPAAAREEAGPARPALAMAVWAAT

SEQ ID NO: 28018 - protein, 106 aa, Homo sapiens
VGSREQHSERVFASLSVPRCPPTRFLTDLSKVLLSSPISVGGMQRVQGVQVPVGVARPGGPPGRRPPKGGAGVSQTRGWGRPQTASKPQPLPQSHEPRQRTTGAGL

SEQ ID NO: 28019 - protein, 95 aa, Homo sapiens
LSLPHCAFLCSGHRSVGPGAAPGGSRAGETGKGPALELQPTPPCPWHPGPGRHLPGTVCLQGFCVFGFFNVLKSFTQVILISERKTEVNVKKHQP

SEQ ID NO: 28020 - protein, 10 aa, Homo sapiens
VHCASFFGNI

SEQ ID NO: 28021 - protein, 12 aa, Homo sapiens
LKMQRASATRFT

SEQ ID NO: 28022 - protein, 109 aa, Homo sapiens
LEWAPVPRSLSARRVPPSAPFAHTYPPPPARLSVASPEAAAAHPGAWRGGGAEGSVRRGPGARAPWSEEDRELALEAAEATPERTKPRLGADLSKMVWLPWRFGDLMPR

SEQ ID NO: 28023 - protein, 55 aa, Homo sapiens
LYCTPLKKTLPLIYQYKKDPLRGGGHFCVMATSLLGRGACSRIRRRQPNLSPPVE

SEQ ID NO: 28024 - protein, 32 aa, Homo sapiens
VSRKEDVGRDGVQRIVWVRGASSIIFVSLELC

SEQ ID NO: 28025 - protein, 57 aa, Homo sapiens
LEQASLEVHPLSATAPLQPAFHCKVEKYLIVSDERENLASFSGGLSCKREMKSNLAS

SEQ ID NO: 28026 - protein, 92 aa, Homo sapiens
LPRFLVTEFLELSHCSNCCDELCLLCVGFQTVAAVTTAGRQHDQQLPRQSLASESCIALMLKPVGACWRDTWMFSELVTLLVMSLIFWPEGD

SEQ ID NO: 28027 - protein, 23 aa, Homo sapiens
MEKQLGALAVRTPKGLIFWPEGD

SEQ ID NO: 28028 - protein, 28 aa, Homo sapiens
LEYFEIGELRVWAPWLQAHEKPEGSHCA

SEQ ID NO: 28029 - protein, 38 aa, Homo sapiens
VLCVHLVHLRSCIYPAHAIDPALFASPVAASGHEVTTA

SEQ ID NO: 28030 - protein, 74 aa, Homo sapiens
LGGFRRNAGTFWVASKEPFPIIMCDFCEVQITEFMFTFSCKQGPLASEKWGRDLLAKMPFLKRETFFFNVRLKM

SEQ ID NO: 28031 - protein, 72 aa, Homo sapiens [sequence omitted]

SEQ ID NO: 28032 - protein, 85 aa, Homo sapiens
LGRPALRIPATTLNSTRSQHEYQHSPTMCKQICAGMRVPGRESTLFLKENGYSSLLFTGNSRGKERWKSRSSVIYCPAPYSLLCL

SEQ ID NO: 28033 - protein, 46 aa, Homo sapiens
LPLRPAAAIQACLSLSLSFMPLSPPHLGTASSKNSCYDTEFNQESA

SEQ ID NO: 28034 - protein, 518 aa, Homo sapiens
LSGSEHTADACEGSLRGSQASGSHPHPPQCSSLGSSRSPHRSRSLASSDSSRLALIHSALHKRQLQVQDMRGHYEANQDLLGTLWKQLSDSEVERRALEEQLQHQWDKTDGAVQAQEDAQREVQRLRNANELLSREKSKLAHSLQVAQQQAKDLLKEREKLQAAQEGLRRQRDRLEEEQEEAVQDGTRVRQELERSHKQLEQLEGKRSGLAKELVEVREALSCTTLQRDMLQAEKAEVAEALTKAEAGQVKLELSVTKLRAEEASLQDSLSKLSAVNESLAQDKLDLNRLVAQLEEEKAALQGRLRQAEQEATVAREEQERLEELRLEQEAARQGLEGSLRVAEEVQEALEQQLPTLRHERSQLQEQLAQLSQQLSGREQELEQARLEAQWQAEALAKGCTGLVMQLAAAEPEGRTLSEEATCLRLEKEALEGSLFEVQGHLVQLEARWDQLEADGQALLLAKETLTGELAGLQQQIIATKEKASLDKELMAQKLVQAEQEAQASLREQRAAHEEDWQ

SEQ ID NO: 28035 - protein, 83 aa, Homo sapiens
VEARYEPVGASPTPQSQRQTVLGRTDARAEEAARSLLTSVSPSNHQPRKGPREPLPVQKSSLHPFLCGKTNCQSLHSLRAWVA

SEQ ID NO: 28036 - protein, 134 aa, Homo sapiens
LHCRHRGEEKASTKAGKHHKPCKSCDDLQSSPGGRLCSTAGSGSTQPRGFQKIISYSPNLTLLSASALSTSLPEMNPISIGFFILLPGLSETKTSWKEFQRDPKKKMVATEPQPHTIPEGPRGIRVRTTEGCDH

SEQ ID NO: 28037 - protein, 42 aa, Homo sapiens
VCVCARARAHGSVWGNRKFCRLGEQYGKSEPRRQRLRELVDK

SEQ ID NO: 28038 - protein, 87 aa, Homo sapiens
LRGTHTCRCENADPRGRNSESRLERDLESDSLETAPRWIRTWLPLSVTQLKAGRSFLFCTWNNKVKMTESPTSTMEKAMVPKSCQVF

SEQ ID NO: 28039 - protein, 133 aa, Homo sapiens
MRPAWPPPGPLSFSGGGDAAVPSVWGQPSSPDPGLERRVAAPGPGGTSRKEDPAAGSAWACLGLFRAGLLLGDHADRGHLEILRESCSQAPGQERPGSLHYLLAPSQHAPRCWGEAGQACPPSPLRMPWTGQL

SEQ ID NO: 28040 - protein, 120 aa, Homo sapiens
MWDTDEIISAQPIRHPDSDAVGQGGGDAAVPSVWGQPSSPDPGLERRVAAPGPGGTSRKEDPAAGSAWACLGLFRAGLLLGDHADRGHLEILRESCSQAPGQERPGSLHYLLAPSQHAPR

SEQ ID NO: 28041 - protein, 17 aa, Homo sapiens
VGFNTAYSNGESQEPKD

SEQ ID NO: 28042 - protein, 244 aa, Homo sapiens
LGQAKMGSCTHGEEINSLCMPVVQNLMERKNLSYDCTGRLEVGTETIKDKSKSVKTNLMQLFEESGDIDIEGTDTTHACYGAPAAVFSAVNWIESSSWDGQFALEFVGDIAVYPTGKVRLTGRVRAVALLIEPNATLIFERGLRGTHMQRAYGFYEPDMLSECPIVDGKPSTQCCFSALDHCYSVDCKTIRAQWQKDGNDKDFTLNNFGFLILHSPYCKLVSLSLARMLRNDFLNDQNRDKNSV

SEQ ID NO: 28043 - protein, 32 aa, Homo sapiens
LQAHRLLPACDVRPRECRGERAGWHELTGGTR

SEQ ID NO: 28044 - protein, 57 aa, Homo sapiens
LGRLPEAALAGPPEGLSSGLPWSSGPTDDEGRGARVSRMECGGAGTSTLLAVPLGWG

SEQ ID NO: 28045 - protein, 42 aa, Homo sapiens
LFLLRGLTMGIRHQRYNSGSCPSIAGHSVHPGRRSYTHVCWS

SEQ ID NO: 28046 - protein, 18 aa, Homo sapiens
LLLYTIEKPSELRGTTNQ

SEQ ID NO: 28047 - protein, 14 aa, Homo sapiens
LLLYTIEKPSELRG

SEQ ID NO: 28048 - protein, 39 aa, Homo sapiens [sequence omitted]

SEQ ID NO: 28049 - protein, 36 aa, Homo sapiens
MTEVEMKLLHGVKNAKKRIEKIGKLEDKNILLEEKR

SEQ ID NO: 28050 - protein, 58 aa, Homo sapiens [sequence omitted]

SEQ ID NO: 28051 - protein, 16 aa, Homo sapiens
LELDPKASTVRTAPWG

SEQ ID NO: 28052 - protein, 283 aa, Homo sapiens
LKLEAELGNMQELVEDFKKKYHDEINKHTEMENEFVLIEKDVDEAYKNKVELESHLEGLTDEINFLRQLHEEEIWELQSLISDTSVVLSIDSSHSLDMDNIITEVKAQYKEIANCSWAKADSMYQIKYEDLQMLARKHGDNLRCTKTDISEMNQNVSWLQAEIKGLKGQRASLEATITDAEKRRELAIKDANTKLLELEAALQWAKQDMAQQLRVYQELMNVKLALDIKTATYKKLLEGEESWQESRMQNMSIYSKTTSGYAGGLSSAYGGLTSPPPQLWPEL

SEQ ID NO: 28053 - protein, 98 aa, Homo sapiens
LIEYLHNALEHDMRLRFNNDRMKTTIKETSTLSNSYLVSINCLTYLMKMSFERCTARNKMFVNSPFTKVDNYCTSSWKKFYLKCYFSLNTIKKEKKMT

SEQ ID NO: 28054 - protein, 41 aa, Homo sapiens
VEPRLAGLIHAQGAATRPLCPGREVGAVGQLRDDPPGPAHK

SEQ ID NO: 28055 - protein, 9 aa, Homo sapiens
LEVLSVMLP

SEQ ID NO: 28056 - protein, 161 aa, Homo sapiens
VEPAPAPEETIDVQVVRKRLSGKWCEPHRCASNEGSGSREARAAPSLSLQWTLHKCFSCPWGCLPSPEIQRLSCSSLLPFTSVLCCRKQTCISLMSSSATFVNFRFGEKHESLNPDPLRESDLARADEGAGPGLAFSSLGCSLCLGPWYSVTAARRPQVSF

SEQ ID NO: 28057 - protein, 113 aa, Homo sapiens
LAKPTNQPGEHRPAVSSPSPASAEIPGPIETRTSLSATASHASAAGNPAISAPAEKVPGCRRRRREREERLGGSPGRGVVRLRERPGCGHTGLVNSHLLGSCSRTHSLPHPLF

SEQ ID NO: 28058 - protein, 70 aa, Homo sapiens
LPSWCTFWRTWWNQRFLADSVGALNQERTRKRCHLLSPGSCGSVESAVKAFGKRGLCGSRGPILPWRPLT

SEQ ID NO: 28059 - protein, 7 aa, Homo sapiens
LVSNSRT

SEQ ID NO: 28060 - protein, 116 aa, Homo sapiens
LPATWCGHHSAPTPALLLRVENSRVPCHRLPSHSKPPGSCPSWSRKCLYLSHPQTAWPDAGTGWNEGGVFISLPSPSHATPAPTGLQVLLMRWDLIEDKKEGEMTPTPSSPSFEKV

SEQ ID NO: 28061 - protein, 204 aa, Homo sapiens
LSCPGPPGRGTGIVARGEAVPQASPKPKGKAGVGPWLKPAPQPKCCTKARAPRARLLQSLPSLALARGGWALPGGCFSTHLLPEAAPRRLEPEVGGPVGVTLLGPQPCRVGRVGTELPASLLRHPASSRRQNALKPPAQPCRYIAGAWGRPWTGGRFPSGVPWRLPGRVEQLGAVPRAVAVSLVFALPSVQKWHLRFSDAPLKP

SEQ ID NO: 28062 - protein, 620 aa, Homo sapiens
LEKNPMNVRILRRHLVFPFIFIVIKELTLEGTPMNVNNLENPLDAPQNFKCMQGLSVEKPYKCKKCEKAFNNLSSFQIHERMHRGGKYHACKGSGNTYRFSGFYHRHKMPHAGGKFYGCKKCGKAFISFCAFRYHQRTHTKEKPYACKQCGKAYISYTSFQYHQLNHTGAKCYECKQCGKGFDLPNSIRYHEMTHTGEKPHECKQCGKTFRCASSLRIHGRTHTGEKPYECKQCGKVSRYWSGLQVHEVTHIGKKLYECKECGKSYYSSGSFLNHKRIHTREKSYECKECGKAFGNPISFQKHEGSHRKWKPYECKECGKVFSFSSSLRRHERTHTEKLCECKQHGKGFFHRSCPRHMKIDTGEILHKRKIRGKVFHSPSSFQTCERSHTREKRYKCKQCGKPFIYFNAFQRHQRSHTGENPYECKQCGKACISSTAFQCRELSHTGAKRYKCKQCGKGFNLPSSIRYHEMTHTGEKPYECKQCGRAFRSASHLRTHERTHIGEKPYECKQCGKVYRYWSGLRIHGLTHIGKKPYEFNDRGKSFYSSNFFLNHKRVHTRVKTYECKECGKAFDNPTSFQKHEGSHRKGKSYECKECGKVFSFSRSFRRYERAHTGEKPCE

SEQ ID NO: 28063 - protein, 46 aa, Homo sapiens
LGGGSHVFTGTVVRAGFAAVRALNPPVELLSRETAGEWLGTNHGNP

SEQ ID NO: 28064 - protein, 19 aa, Homo sapiens
MWFSFPFLICEKVTEKKSS

SEQ ID NO: 28065 - protein, 67 aa, Homo sapiens
LLTPPSPSFPQSSAAVLPSLYPRRAAARGAAPFPPSPVGLLPLPEPRVRTAEAAGVIWRTMHVSLTS

SEQ ID NO: 28066 - protein, 115 aa, Homo sapiens
LRPAQGCRTPASPSGTSWTCPRPTSSSKVKVSVPLRGKQAGGDSTLSGCVGHHRCWRTVCCHPVGLHITREHLLKGRWGRVRWLTPVIPALWEAKAGRGKEIETILANTVKLRLY

SEQ ID NO: 28067 - protein, 91 aa, Homo sapiens
VSPEGPAGVTPLLHTATCCQHLCNVSRSLGARMKNMHLVTNEIGLVLKTSCIHPFSHCYKDIPKTGHFMKKRGLIGSRFCRLYRKHSSFHF

SEQ ID NO: 28068 - protein, 180 aa, Homo sapiens
VQQIGKCCGRRPWALSAQASRGVEGLSPPTGGSRRGAANSARPRLPSAVDRVCRVLASSPKGPDGPRGPSQPAASSQTLKWEQSFQKGSAFGRPRPAQPRGPLIQRLAALGVRGPAGPLETPMRNELMLDARAPWAQLPSAKRAPKAGEGKCRQAGYPEASEEMGGSEEPVVALDLLELG

SEQ ID NO: 28069 - protein, 47 aa, Homo sapiens
LMCYYWGGWSSKKRRRKKRAGLCWQRLSAGLTCGGDGRTYGVRLQVF

SEQ ID NO: 28070 - protein, 104 aa, Homo sapiens
LRRRVQPLVRGAVHRLRSGSAQPFAQAPRPAARVRERACAAGAAARGGERPPQEDPFSPRNYSMLKPLKVVLETLKAPWTGFMISKSLLWSQGNLDLRNAEGGL

SEQ ID NO: 28071 - protein, 51 aa, Homo sapiens
LASSVPICFPERGEEISEDAMPEWLTLQENRRTKSEQETYRIGENFCNLLI

SEQ ID NO: 28072 - protein, 72 aa, Homo sapiens
MISVTKTDNQEACVLSESSMFVSKKRFILKTRGTTLLLKALVPLLKLARHYSGFDSIQSFFYSCENFMKPSP

SEQ ID NO: 28073 - protein, 63 aa, Homo sapiens
MKLAHDEPVFSVTTILTRMNGGGSGPASQVAADVLNISIKISLFPYARGAPELHPYGSYHAVM

SEQ ID NO: 28074 - protein, 53 aa, Homo sapiens
MSRAISPLNGIFLQTGTEKRKYYHPPANLLGGLLAEDSCSRCCTRGAASVSSR

SEQ ID NO: 28075 - protein, 33 aa, Homo sapiens
LDAQSAGPAALGPWTVRRGHQKRDSAKSCLTSR

SEQ ID NO: 28076 - protein, 42 aa, Homo sapiens
LTETGTEKRKYYHPPANLLGGLLAEDSCSRCCTRGAASVSSR

SEQ ID NO: 28077 - protein, 27 aa, Homo sapiens
MVTWAQVKVLISLLNHHIPYTEWDSIG

SEQ ID NO: 28078 - protein, 15 aa, Homo sapiens
VLICLDVNVNNGNLS

SEQ ID NO: 28079 - protein, 44 aa, Homo sapiens
LLKLVRGFPTSQKSFIGPPLETSDRSHRRLASGICPHPRGQLLR

SEQ ID NO: 28080 - protein, 118 aa, Homo sapiens
LGSRPPPSAAPPHPGEVRRRLCRCGRSSSAPIPGKPGTGTFENNCSGIRVRVRALRLRQDRVKWSGRAEGAKVRVLVPRSRREPRLRRATPSLALGAQHPADKRRDARTRRARSLSNF

SEQ ID NO: 28081 - protein, 128 aa, Homo sapiens
LICLQVSRASSLKAPSTSIPHPVSVTIYKLDTSCTSQKGQKPNTKSITAKKARSRRRWEKKEEKKRTRNTKRISTSSTKNTRKRLWLQPLRPLQPLQLPQPHYHRKNQWQRQSRRRILKVKLKITFMT

SEQ ID NO: 28082 - protein, 102 aa, Homo sapiens
VMLRKARRFLFRSPPSVTPWKREAKAQDWANLGGLFGRKTGQAVGFSYTDAHKNKASPGEKDTLMEYLENLQKYIPGTKMIFSGIKKKTERAEFIAYLKKSY

SEQ ID NO: 28083 - protein, 184 aa, Homo sapiens
MGATTHTSRRRDTLLFLQGPPPLPARVRALPRRDHRPRPGRQGGTRSPERATCALFPPRCPGPLSAVLAPPHPRPREAPTSCSSSWDPLARDPCSPAPRTEEPPGPGHAWASPRCQAGPGLPQRSRLLWSLAQGAVAGDRRPEEEAIEEARNGRGGAQPRPGQPAASKHSSRGIPCSRHPREES

SEQ ID NO: 28084 - protein, 64 aa, Homo sapiens
VSVPLYTATFCSRHEPLGLHLHIANTMFHVGSSFRALLFTSKKVPLRTGCQFVLLCWLLMKIIK

SEQ ID NO: 28085 - protein, 26 aa, Homo sapiens
LPFLHDPGPEPKLRHCIDDHFRKLLT

SEQ ID NO: 28086 - protein, 17 aa, Homo sapiens
LRKTRCLCSLQAEVTGE

SEQ ID NO: 28087 - protein, 35 aa, Homo sapiens
LVCVEGGRQGEVEGVEESGGIGRSSPGNDQEDQGL

SEQ ID NO: 28088 - protein, 11 aa, Homo sapiens
VVLFWNFFQVI

SEQ ID NO: 28089 - protein, 51 aa, Homo sapiens
VSLSAYSKFFSWNLEGWEEGVGLTCCSFFFFYRLHRECSCLDFRSVCSVGK

SEQ ID NO: 28090 - protein, 33 aa, Homo sapiens
VAEPRRGHLKAALASLGGAAPAAATNGSPPLFK

SEQ ID NO: 28091 - protein, 125 aa, Homo sapiens
VQLLVRDTSSFRGGKRVCSVFWMGRGAVTGQGYEFFSGRQVCSKRVLDGERCSHWSGTRVLVGRGVSGSQMAVMGGRPRGWTDHRPMLCTHEAWLLLCESHLHGNGSGRNGPQGCCEDGLMGLHW

SEQ ID NO: 28092 - protein, 8 aa, Homo sapiens
MELVGEGG

SEQ ID NO: 28093 - protein, 37 aa, Homo sapiens
LSIRSAARYASRAPGSWWRASGPPPSTPVTKPPSLHG

SEQ ID NO: 28094 - protein, 80 aa, Homo sapiens
LGRLLSLPTLPGPNWISAPGSSNFSKCEILSSVLEFSSAQTISATDRICENTSMSRLGIILRHHLASPASHFKVRIPSSL

SEQ ID NO: 28095 - protein, 95 aa, Homo sapiens
LGRLLSLPTLPGPNWISAPGSSNFSKCEILSSVLEFSSAQTISATDRICENTSMSRLGIILRHHLASPASHFKVITGSGLPLKGILMLTTSPRRA

SEQ ID NO: 28096 - protein, 94 aa, Homo sapiens
LGRLLSLPTLPGPNWISAPGSSNFSKCEILSSVLEFSSAQTISATDRICENTSMSRLGIILRHHLASPASHFKNQRWGEWWKGLWTYGCCCDTL

SEQ ID NO: 28097 - protein, 89 aa, Homo sapiens
LGRLLSLPTLPGPNWISAPGSSNFSKCEILSSVLEFSSAQTISATDRICENTSMSRLGIILRHHLASPASHFKRIDALMAPLAVLDDHG

SEQ ID NO: 28098 - protein, 33 aa, Homo sapiens
LPETPYRYSSELMQSVHMRRDFPLSPSSVISLP

SEQ ID NO: 28099 - protein, 34 aa, Homo sapiens
LPSSEAWTEEISKMQSVHMRRDFPLSPSSVISLP

SEQ ID NO: 28100 - protein, 34 aa, Homo sapiens
LAVFVIIRNLSDYLSFFFPFLLELLAVEEHHAYL

SEQ ID NO: 28101 - protein, 35 aa, Homo sapiens
VASLCVPDPAHGTRVPAIRQCFYSSNPKMLELEGT

SEQ ID NO: 28102 - protein, 34 aa, Homo sapiens
LSLMFKQSSHGTRVPAIRQCFYSSNPKMLELEGT

SEQ ID NO: 28103 - protein, 99 aa, Homo sapiens
VVAWKPCHPTPGHPLPEDAISLTVAGSLALCPNWVEPPGAVCSGGCCGGAFLSLWPSWLRFNQMLLPSPVFPTGAAQACRWVVCIGHVCPTYAGGAPHS

SEQ ID NO: 28104 - protein, 133 aa, Homo sapiens [sequence omitted]

SEQ ID NO: 28105 - protein, 15 aa, Homo sapiens
VRGVLAFLLFNTGRR

SEQ ID NO: 28106 - protein, 43 aa, Homo sapiens
LLVLAGGEHSSVAILRPLLFLRWSPTCLDQLNGSAPGNVFIHG

SEQ ID NO: 28107 - protein, 24 aa, Homo sapiens
LKWWSPTCLDQLNGSAPGNVFIHG

SEQ ID NO: 28108 - protein, 125 aa, Homo sapiens
LDGSNVSKKNGARCSSLTGTASARSTSPPTAAQPTTAQARCVPPAPCETDFPVSREWGRPPSQFSLRPPLLARSLPSPQASSCAAQLPKRLSPLETVGRTVVASATRGKRLLPSLNWTPRAPESA

SEQ ID NO: 28109 - protein, 24 aa, Homo sapiens
MYKLRRKLEDRNKIENENIVKSFR

SEQ ID NO: 28110 - protein, 18 aa, Homo sapiens
VQLWFIFSHLRRTSEELE

SEQ ID NO: 28111 - protein, 385 aa, Homo sapiens
MWKSWKLRTDVRVREGAGGSPCASSQPGSRGPCFLPGLSSQEVSRRRQFLREHAAPFSAFLTDSFGRQHSYLRISLTEKCNLRCQYCMPEEGVPLTPKANLLTTEEILTLARLFVKEGIDKIRLTGGEPLIRPDVVDIVAQLQRLEGLRTIGVTTNGINLARLLPQLQKAGLSAINISLDTLVPAKFEFIVRRKGFHKVMEGIHKAIELGYNPVKVNCVVMRGLNEDELLDFAALTEGLPLDVRFIEYMPFDGNKWNFKKMVSYKEMLDTVRQQWPELEKVPEEESSTAKAFKIPGFQGQISFITSMSEHFCGTCNRLRITADGNLKVCLFGNSEVSLRDHLRAGASEQELLRIIGAAVGRKKRQHAGMFSISQMKNRPMILIGG

SEQ ID NO: 28112 - protein, 75 aa, Homo sapiens
LNFINWALRAPARSQKGEGRRELACGTPDRRGCAFPAPGPSRHTRSSPLARANAQDDHHPRVCHHLRLERSFMQG

SEQ ID NO: 28113 - protein, 32 aa, Homo sapiens
VRRWYPEDAVTASGICRSALLRKDPLLGRRPP

SEQ ID NO: 28114 - protein, 33 aa, Homo sapiens
LEGVEWHGLELNQENRAQEEETRRITQKVLRSS

SEQ ID NO: 28115 - protein, 66 aa, Homo sapiens
MVKLNLVRWTLGQTARERQARGLTSSTPEFEPYEQWNLGTTKDPDIILSSVIEKRIWDLRRYLLIF

SEQ ID NO: 28116 - protein, 230 aa, Homo sapiens
LGLVGLWPFSQFGLDEKDGLAFPVAAVGKGCRVSARPAARRADPASPFLPSPHSTEPVAPGPCATLPGPGRLVWRWRPESRGLCWIRAHPVAADGRPGRPGRPVLSAARAVRAGCWRDGHPGGGDLGQWEHSATPTPGTKHQCASSLPAAALRRHWHLQGPVLGPLAAHPQCALPHLPALEASICSGEDPHHLQPHFYHLLHPGVCGGAGGHCPGRGIHDGEHLERCNCC

SEQ ID NO: 28117 - protein, 91 aa, Homo sapiens
VPGRRPDQPGGGLPVWGEVDSLVQPSQLQILEETEQGAQASGSHGPCLRACQHGELGPGRCVCSVGTDSSGAGEEAGGQEQHTDTGRQLEV

SEQ ID NO: 28118 - protein, 73 aa, Homo sapiens
LNILLNSPRPMDGCSPLSVSPDVLKTNRQKKEVANGAVESKCDCQEESSKAKKPKHVALPEARHTHGKPRGNE

SEQ ID NO: 28119 - protein, 81 aa, Homo sapiens
LPTEIVPATLHHSRPETGRPPPEGLEGEQPARLTRGEADRDTYRRSAVSPGADKKAKAGAGSTTEFQFRGRFGRGPGQPPQ

SEQ ID NO: 28120 - protein, 82 aa, Homo sapiens
LEKQEAQLFRIKNKNNNNKNLHLHSQIKLTLWHQTPWGDFSSRRVQVDRVLHPGYSRRGPSSHSHWVSGFQRSQSVSSRSLF

SEQ ID NO: 28121 - protein, 100 aa, Homo sapiens
VRLSCPISLGCPCFVLWTTAQQCPALCLGLGPSCTCCLDPRPAWAWALVLPMTPPERLFLPRVCGTTLHLLLLGLLLVLLPGAQVRQQENGGCWGGSAKP

SEQ ID NO: 28122 - protein, 108 aa, Homo sapiens
MGPSSYRKTSSRLPLILHYVHGKTVFPGAKKVDGCSAARSLNNACDIDNPSERCLSNVPSGHDFWQESWRCDQLHMTLPKSLLCKGHFLESGCRNSLSHCCPRQHYCL

SEQ ID NO: 28123 - protein, 155 aa, Homo sapiens
VQEGNLKVKKPKKGKPYCSHNPVLVRGTGRYSRSAMYSRKAMYKRKYSAAKSKIEKKKEKVLATVTKPVGGDKNGGTQVVKLHKMPRYYPTEDVPRKLLSHSKKPFSQHVRKLQASITPGTILIILTGCHRGKRVVFLKQLASGLLLVTGPLVLN

SEQ ID NO: 28124 - protein, 53 aa, Homo sapiens
LGMCLDPAQHTSGPTASRTNLWRAARRLPPSHRPPPAPFFPPIQYKIFLPQFP

SEQ ID NO: 28125 - protein, 92 aa, Homo sapiens
LPEKEHERGSPRVKSSILPAGLPAPPSFSPRPPSPPPAGAIRRHPPSLPPHPQVRGVSSGSGDPEEPSRVTICSATWQELEEGMIFSGVFLR

SEQ ID NO: 28126 - protein, 26 aa, Homo sapiens
LGAASVAAVRAALSDYLNKKTNWKKK

SEQ ID NO: 28127 - protein, 114 aa, Homo sapiens
LRCGRPGKGDPERIGGFASGPALPLIPQPAVRNPCRIHETLPIAAGGHFALELTTPEQGRDSPDAGRLFCPFGDTSPPLPGPASLKGSPCSCLDAGFFSGSGKPAASRDDAPQR

SEQ ID NO: 28128 - protein, 113 aa, Homo sapiens
LRCGRPGKGDPERIGGFASGPALPLIPQPAVRNPCRIHETLPIAAGGHFALELTTPEQGRDSPDAGRLFCPFGDTSPPLPGPASLKGSPCSCLDAGFFSGSGKPASRDDAPQR

SEQ ID NO: 28129 - protein, 175 aa, Homo sapiens
MAPHGGNTLEIVQKMGRCRLECGEGLRPCLVDGTVTAAVCLLGGASPPAAGRPLRETAESWSPGQPGGDPSAGHRGHSRQQELRTLSATLLSNLWTLSSGQSCRIRHRTYSSALGRGSLKKSPGLKTKRDTSVRYGRSSPPRTDPGTATRILNQGQRREGCGREWVFLKYIPVGT

SEQ ID NO: 28130 - protein, 43 aa, Homo sapiens [sequence omitted]

SEQ ID NO: 28131 - protein, 87 aa, Homo sapiens
LAQPSLAQPRSAWLNSAQPSPALLNPALLNSARLSPAQPSSAQPCSAQHSRAQLSPAQLSSAQPCSAQHSRAQPSPAQLIPAQPSPA

SEQ ID NO: 28132 - protein, 74 aa, Homo sapiens
VQAPSGSCGFSPARRGRCRGHFIWGLHLGYSSEGVTGRRSLSQQLRAQGGNQHWTRHHLISGTHTQTFTPPGMM

SEQ ID NO: 28133 - protein, 440 aa, Homo sapiens
LLHAVVPGPWQEDVADAEECAGRCGPLMDCWAFHYNVSSHGCQLLPWTQHSPHSRLWHSGRCDLFQEKGEWGYMPTLRNGLEENFCRNPDGDPGGPWCHTTDPAVRFQSCSIKSCRVAACVWCNGEEYRGAVDRTESGRECQRWDLQHPHQHPFEPGKFLDQGLDDNYCRNPDGSERPWCYTTDPQIEREFCDLPRCGSEAQPRQEATSVSCFRGKGEGYRGTANTTTAAYLASVGTRKSHISTDLRQKNTRASEVGGGAGVGTCCCGDLRENFCWNLDGSEAPWCFTLRPGTRVGFCYQIRRCTDDVRPQDCYHGAGEQYRGTVSKTRKGVQCQRWSAETPHKLQALTLGRHALMSGTRAWKWLRLPCHDFAPAPASVHIYLRTACTTGGELLPDPDGDSHGPWCYTMDPRTPFDYCALRRCADDQPPSILDPPRPGAV

SEQ ID NO: 28134 - protein, 163 aa, Homo sapiens [sequence omitted]

SEQ ID NO: 28135 - protein, 17 aa, Homo sapiens
LSYLLKVHVLLMLTLID

SEQ ID NO: 28136 - protein, 39 aa, Homo sapiens [sequence omitted]

SEQ ID NO: 28137 - protein, 125 aa, Homo sapiens
LYPVPSELPLRAPRGPRLPASWRQGYHQSHASRVRPPHPGAKERDRGLDSPGSSLDEGKGRFGDGEDTRRPERGYLTRAARTPFPSLPGTPGFPPSEPGWEVTSMRLNFSWIEREARSSACQQPP

SEQ ID NO: 28138 - protein, 328 aa, Homo sapiens
LVRGLHGHSPPQQDSAHTPATQSLANGLLGRSNVTITRGCEPGASACSRCCPQGAPALLTLDPQKPPTFTMSDEEVEQVEEQYEEEEEAQEEEEVQEDTAEEDAEEEKPRPKLTAPKIPEGEKVDFDDIQKKRQNKDLMELQALIDSHFEARKKEEEELVALKERIEKRRAERAEQQRIRAEKERERQNRLAEEKARREEEDAKRRAEDDLKKKKALSSMGANYSSYLAKADQKRGKKQTAREMKKKILAERRKPLNIDHLGEDKLRDKAKELWETLHQLEIDKFEFGEKLKRQKYDITTLRSRIDQAQKHSKKAGTPAKGKVGGRWK

SEQ ID NO: 28139 - protein, 191 aa, Homo sapiens
VPLSVVLPGAPQHDSPGAPLSAVLLGASVIVVLPGAPLGAVLLGAPQRGALLGAPRRSSPRGLLGAVLLGAPGAFRRGSPRGFFGAVVPGGSSARFSPGASRRGSVLPGGSSAWFSSARSSLGLLSAALSWGLLSAALSPGAPQRGTLPAAPQCGSPRLSSARPSPSLWEGLNTVSTDLGGRRGTGDHWRC

SEQ ID NO: 28140 - protein, 13 aa, Homo sapiens
LVNHEFFCFFCVG

SEQ ID NO: 28141 - protein, 13 aa, Homo sapiens
LLLTSDELNTAPV

SEQ ID NO: 28142 - protein, 34 aa, Homo sapiens
LSAPQDWAVAGGPGGGPRTVVVPPPQRPDRMGPS

SEQ ID NO: 28143 - protein, 20 aa, Homo sapiens
LMFPEWAPGCCLSLTLHFPI

SEQ ID NO: 28144 - protein, 23 aa, Homo sapiens
LEPEVMQAGAGRDRANFQAWGPP

SEQ ID NO: 28145 - protein, 122 aa, Homo sapiens
LGHSRVRGCHCHLGHVGRHQHFVVTNSTVTNIFGQIPFYTSRQLLVCNPTGQREGPVTWLSHCPAPQMVLGLLFSLGPANTTVFTSAHWLSAVVPGSQWHVSPRSSLIPQHTPKGSVANTLN

SEQ ID NO: 28146 - protein, 11 aa, Homo sapiens
LFCWQVNAVLF

SEQ ID NO: 28147 - protein, 67 aa, Homo sapiens
MRTALMLAVHYDSPGIVNILLKQNINVFTQDVWTRCRRLRYFSLFDRIQQQILEHKKMILKNECWKF

SEQ ID NO: 28148 - protein, 98 aa, Homo sapiens
LPLAKDRSCSGINFDIIFQTSFMWLPFSLFKMRARRGNITPALNPVPGGQHLICCKPLFLSPLPTLPPLTLLLTLLEPCLPGGPISSGRPCLWATWSV

SEQ ID NO: 28149 - protein, 62 aa, Homo sapiens [sequence omitted]

SEQ ID NO: 28150 - protein, 37 aa, Homo sapiens
VISAHCSLSHPGSSDSPASASQVARITGAHHHAQPDF

SEQ ID NO: 28151 - protein, 74 aa, Homo sapiens
VWPVDDAIKLRCEAEVRQRLPSFCLAQFSVREQRWEMRGPLPQCFCIQAPALLKVAPTATLHTAARRTLKYRSF

SEQ ID NO: 28152 - protein, 134 aa, Homo sapiens
MGPWLSRECSKQPACRPSLTNDEHFLGSALDTETSVFTPASIMVFGASRARGLSGGKRTGPDLPELTGPPRWVWDILEALHLSLDRGPGGAWNVAKKKVTQGMSVFYPSAWVGFSKIIICRRKASIYDAICNYI

SEQ ID NO: 28153 - protein, 89 aa, Homo sapiens
LQSPGSRLSSQVETMEGDGAGPPAKMAAAGPGRLRHGMCSPGVWPLPCGNEGEDYEKDGDLAPRPLRRCLLGNVVPCRVQQRKDVAVEM

SEQ ID NO: 28154 - protein, 53 aa, Homo sapiens
VNGQRKYGGPPPGWVGSPPPAGSEVFIGRLPQEVYEHQLSCCSSAWAASTSSA

SEQ ID NO: 28155 - protein, 30 aa, Homo sapiens
VGSKWRHVLWPVGGETRSRLLVVADSQSAG

SEQ ID NO: 28156 - protein, 41 aa, Homo sapiens
LGFLRIDISVKQKSGNRSGNPPNFYSLSPRLLIHWEVSNQL

SEQ ID NO: 28157 - protein, 364 aa, Homo sapiens
LSSNLHTPFVLGKHLNPNLEYFIQNRSYARNEGECNGYDKVFLYPKHEKIHAEEKYNEYNERVKAFSHKSQLIKHWKTQKREKQYDCSDCGKAFSQKLDLFKHQRTQRGEKPYGCSRCQTAFRWKSCLILHERTHTEEKPYECNKCGKAFTDKSCLNKHQRTHTGEKCFECHTCQKGFSDKSKLTFHQRTHTGEKPYGCSKCQKSFSNKSQLMIHQRAHTEEKPYGCDECGKTFPLKFNLILHQKIHTGEKSHGCNECGKAFIQRSELSRHQRTHTGEKPYHCSECGKGFSVKSFLNTHWRTHMGEKPYGCNECGKMFSIKFSLILHQRTHTGEKPYECSQCQKTFSQKSHLNIHQRSHTGEKP

SEQ ID NO: 28158 - protein, 139 aa, Homo sapiens
LQEWMPRNRSCSPGPRAWGMRCTCPARWLRLPPPPDQRDIPPLTPGPVPSRATPRDVVTCRVQVFLVPGTSRLTGSSEVHAEETRQDLPRLRPGRPMRFVIPSDSVGRVGTRRREGIQGAPPVHGCPPVHFLHHSRLHV

SEQ ID NO: 28159 - protein, 29 aa, Homo sapiens
LLSPSTLSPLVPLCPMHSHLSQPPGRNVG

SEQ ID NO: 28160 - protein, 13 aa, Homo sapiens
LFQNNWEMKQEAL

SEQ ID NO: 28161 - protein, 18 aa, Homo sapiens
VSGGRTVIPAEQERDERP

SEQ ID NO: 28162 - protein, 18 aa, Homo sapiens
MLCLHTGSRRICQTINCL

SEQ ID NO: 28163 - protein, 127 aa, Homo sapiens
VQPVWASGERQERRDSEFPQVRPTWWWVRAQLHALGEVRGERCGGAPSLRLSAGRRPAPRDDATELMTDPKLITWSPVCRNDVAWNFFEKFLVGPDGVPVCRYSCRFQTIDIEPDIEALLSQGPRCA

SEQ ID NO: 28164 - protein, 86 aa, Homo sapiens
LGTASAWPVSFELSPLPYPLTSSRRKPPGSPGCPARWCPSSSCPSPLPCRSCTPTCIAARSRSWRYFTRWARVRTRESPGRSSSRL

SEQ ID NO: 28165 - protein, 77 aa, Homo sapiens
VPSQMPPRQLPGPPGRKPPGSPGCPARWCPSSSCPSPLPCRSCTPTCIAARSRSWRYFTRWARVRTRESPGRSSSRL

SEQ ID NO: 28166 - protein, 89 aa, Homo sapiens
VARGGRNDKAILKAGRAHHKYKAKRNCWPRVRGVAMNLVEHPFGGGNHQHIGKPSTIRRDAPADRKVGLIAVRQTGRLRGAKTVQEKEN

SEQ ID NO: 28167 - protein, 142 aa, Homo sapiens
VVQWVSSLDSNAVSPASVSVFPTLGIMHHNKQATENAKAEVRRILGLLDAHLKTRTLRLADIVVFCTLLWLYKQVLEPSSCQAFPNTNCWFLTCINRPQFRAVLGKVKLSVNMTRFDAKKLAEGQPEKDTPWKGKGSRENKQ

SEQ ID NO: 28168 - protein, 276 aa, Homo sapiens
VEQVVADAGAFLRDAALQDIGKNIYIIREVVTEFRDKATCRRLAVLPYELRFKEPLPEYVQLVTEFSKKTGDYPSLSATDIQVLALTYQLEAEFVGVSHLKQEPQKVKLSSSIQHPETPLHISGFHLPSKPKPPQETEKGHPACEPENLEFSSFMFRRNPLPNIDHELQEPLIDRGEDVPREEEEEEENGFEDRKDDSDDDGGGWITPSNIKQIQQELEQCDVPEDVRVGCVTTDFPRQNVLLQMGLHVLAVNCMLIREAQSYVWAATAVSRQRLT

SEQ ID NO: 28169 - protein, 73 aa, Homo sapiens
LQAPARRVSGVRKDRALLADPVFRFQPPISERSRQRAGNRHGQSRGDRHRPGHHLLLRGGVPTRQGGAQRAHL

SEQ ID NO: 28170 - protein, 98 aa, Homo sapiens
VQPIRCTNCARCVPKDNAIKKFVIRNIVEAAAVRDISEASVFDAYVLPKLCVKLHYCVSCVIHSKVVRNRSREARKDRTPPPRFRPAGAAARPPPKPM

SEQ ID NO: 28171 - protein, 230 aa, Homo sapiens
MTPEENAGTKLLLQGFESRFLVARTLRSFPWQSLEAKLRDSSDSELLQDILQKTVRHPVCVKHPPSVKYAWCFLSELIKKHEAVHTEPLDELYEALAETLMAKESPQGHRSYLLPSGGSVTLSESMAIISHSTTGLVTWDAALYIAEWAIENPAAFTHRSVLELGSGASLTGLAICKICRPRAYIFSDCHSRVLEQLQGNVLLNGLSLEADITANLDSPRVTMAQRWTGT

SEQ ID NO: 28172 - protein, 229 aa, Homo sapiens
MTPEENAGTKLLLQGFESRFLVARTLRSFPWQSLEAKLRDSSDSELLQDILQKTVRHPVCVKHPPSVKYAWCFLSELIKKHEAVHTEPLDELYEALAETLMAKESPQGHRSYLLPSGGSVTLSESMAIISHSTTGLVTWDAALYIAEWAIENPAAFTHSVLELGSGASLTGLAICKICRPRAYIFSDCHSRVLEQLQGNVLLNGLSLEADITANLDSPRVTMAQRWTGT

SEQ ID NO: 28173 - protein, 132 aa, Homo sapiens
LIQELCLMSLMKKKYKLIPENIWMEIGKSIWRTLLLIPIILLSLVGSTKDHHENKYCDLECSHTCNYKTRSSSYLDNLAWRGSEVNHYYELRLVIDLSNWKEQSKEKSDKKGKSKCERYGLVKAQIALEEAS

SEQ ID NO: 28174 - protein, 44 aa, Homo sapiens
LVKHLMHVPSGAQLGLRTSQVSSNGNQPRLFLPAPALSNSPRCG

SEQ ID NO: 28175 - protein, 76 aa, Homo sapiens
LVLAVPAPAPAAPRPARGPRGAHARGLFGRKPQAPREMSSLSPASNRLGTHPDSHCQWRRSPLVKTSGEHGRWKYI

SEQ ID NO: 28176 - protein, 230 aa, Homo sapiens
LLVRHRPRALCHTNQSLGRGLATTRGRGSDGNGPTGNGDHPNFSLSEGRAFGSLAAQPITSCLSVPAPPFSLGKLQDGLLHITTCSFVAPWNSLSLAQRRGFTKTYTVGCEECTVSAWTLTSNGRSFPGPFPKSWACFLLPLAILCPCGCSPTLRAVPDLSCYFPKPETAPLQILAAPFPCVQYRVITCPSLVPLILPCDYSVIPLPVPEPPGLFLGSPECSPRTQSAVP

SEQ ID NO: 28177 - protein, 26 aa, Homo sapiens
LFFWPIGAADTCFDFFFSSPIGAFYG

SEQ ID NO: 28178 - protein, 25 aa, Homo sapiens
MWSNLHSQSTQTRTWLPGSRGVCVK

SEQ ID NO: 28179 - protein, 177 aa, Homo sapiens [sequence omitted]

SEQ ID NO: 28180 - protein, 58 aa, Homo sapiens
VAKTLEGQAERVCLVFGSQVRGLFHTGFKVSFIFINEESYLGARKMSEVKGLTKDFLQ

SEQ ID NO: 28181 - protein, 28 aa, Homo sapiens
LPAQPLPWGGALPCAARGWCSVRVPPGA

SEQ ID NO: 28182 - protein, 58 aa, Homo sapiens
LYFAVNSDILKAHFSVIHFFLAIVLTLKRFVAGFLVSEKVVVFPLFLFFSFFFSFLFF

SEQ ID NO: 28183 - protein, 57 aa, Homo sapiens
VQKKSGRERRRPPLPCTALLEATWRVRPRGGHGHKCPQLAPGCQRRYSPDQGRIISG

SEQ ID NO: 28184 - protein, 37 aa, Homo sapiens
LGWCSRLRDPDRGKQGRRGCQRGGRGGLMGIPSCCPS

SEQ ID NO: 28185 - protein, 68 aa, Homo sapiens
MLLEQPPRSRPRRHLLFLRRSFLRRCRACGAEGPGRARRAPPRRLASLAAFRPQWSAGRPLLRPGRGL

SEQ ID NO: 28186 - protein, 91 aa, Homo sapiens
LKNWNRKECGGRGRGLFVCSWNARRGMVECVASRDRTTGGMFCASTVTLFPAWGLWERWRETGTEMVRQGESHKEEDREKEDKCIKRFRDV

SEQ ID NO: 28187 - protein, 331 aa, Homo sapiens
MNVKNVGKLNQSSDLLRHHRIHSGEKPYVCNKCGESFRSSSDLIKHHRVHTGEKPHECSECGKVFSQRSHLVTHQKIHTGEKPYQCTECEKAFRRRSLLIQRRRIHSGEKPYECKECGKLFMWHTAFLKHQRLHAGEKLEEREKTFSKDEELRGEQKIHQEEKAYWCNQCGRAFQGSSDLIGHQVTHTGEKPYECKECGKTFNQSSDLLRHHRIHSGEKPYVCNKCGKSFRGSSDLIRHHRVHTGEKPYECPECWKAFSQNSHLVSHQRIHTREKPFECSNCGKAFSGWTAFLKHQKLHIGKEFEDCKSLQTGPILIGSRNLMNAVKLGKV

SEQ ID NO: 28188 - protein, 39 aa, Homo sapiens
VLTYKPAMIKGGGCGLENSHVKTHHLKVLSVRIFMMKFL

SEQ ID NO: 28189 - protein, 121 aa, Homo sapiens
LACQGRRSEGAGPGRAGWRRGTVTAKKIWSAMGPGWSLWKKVKDQRNQSLFRIRLSEMKKEGINDSTGPLVEVSLLDTSILLAQKKDGHPLPLCLHDRTEQTNLFLVLKILWMKRILVNLG

SEQ ID NO: 28190 - protein, 187 aa, Homo sapiens
MLVTFAPVSVTTEVKSVEMHHEALSEALPRDNVGLNIKKVSVKDARPGNVAGDRKNDPPVEAAGFTAQVLILNHPGQFSTGYAPVLDCHTAHIACNFAELKEKIDICSGKKLEDDPKFLKSGDAAIVDMVLGEHMCVESFSDYPPLGHFAVHDMRQTVAMGVIKALDKKAAGAGKVTKSAQKAQKDK

SEQ ID NO: 28191 - protein, 79 aa, Homo sapiens
LYLSGPVLVMISLLTEAVPQKQTCNRRNRSQCHPSAVVTSKKVSRHGQMSPGGQNHPQLRTTALNYGVSLCHPGWSTVA

SEQ ID NO: 28192 - protein, 101 aa, Homo sapiens
VKKPHHYRPGTVALREIRRYQKATELLIRKLRFQRLVQEIAQDLKTDLRFQSAAIGALQEASEAYLVGLFEDSNLCAIHAKRLTIMPKEIQLARRIQGKRA

SEQ ID NO: 28193 - protein, 90 aa, Homo sapiens
LARLFLRPRGPRSPIIQFRRVTGAAVASQGAGSLSPALLPLAPSPRPRRAGLRGQGPSGEGYHLTWKKMSSLEKKHSNVIVQNSLNIHNR

SEQ ID NO: 28194 - protein, 100 aa, Homo sapiens
LAVAAWSLTQGRRAGERGHPESGESTAAACVRSVRGREQGQRPGLRPAFPRLETGSFVDLCLHHRLCQGVLQISLVLFSSVKRPYRITDFMLALPPYKIT

SEQ ID NO: 28195 - protein, 90 aa, Homo sapiens
MMLGSLAPDPGSRRHSGQAALRPRRYPTLWDRCRKRWLRPIFTQLLAAGLAYHTLLPIPSEPLFAAPGEHLHQCFVKESYCPPRVLAKEQ

SEQ ID NO: 28196 - protein, 109 aa, Homo sapiens
VEIKQLFCRLDYKDTIAVARFIVFLASSSTSRDGKPCIFLKAFEDLKSTVYVYVKSLRDFSTESMSLVPATNYIYTPLNQLKGGTIVNVYGVVKFFKPPYLSKGTDSSI

SEQ ID NO: 28197 - protein, 73 aa, Homo sapiens
VEIKQLFCRLDYKDTIAVARFIVFLASSSTSRDGKPCIFLKAFEDLKSTVYVYVKSLRDFSTESMSLMLLDLQ

SEQ ID NO: 28198 - protein, 29 aa, Homo sapiens
LPGHFCMISNVFVIYLTNCLICYVNVFMN

SEQ ID NO: 28199 - protein, 119 aa, Homo sapiens
LWPVWGLQRPPGLQRVLCPQRQADPAPVWEPAEVGWAHGAVPGPAALAGRQLHGRGGHLPPHPAGAGLCGVPRTGGQHCVPGRLRPGPVPLPHLPVCHLCGILTPVRPRGGPAAELEVP

SEQ ID NO: 28200 - protein, 22 aa, Homo sapiens
MVKEKRREVERAREKLGVMMTD

SEQ ID NO: 28201 - protein, 60 aa, Homo sapiens
LMGSAQCFRSPTYQQPSAGSARGSKETIRPIPCPQEAYHPAAQRRLTMDSIQERGRIGCE

SEQ ID NO: 28202 - protein, 27 aa, Homo sapiens
LGCTQRRVCGPGFDGNATREAGSPLLK

SEQ ID NO: 28203 - protein, 51 aa, Homo sapiens
LVLPHFPNPSVSLAMSLNLLQPGHRRYPDIVMKLRMCPWWTLLDPACTLLG

SEQ ID NO: 28204 - protein, 30 aa, Homo sapiens
LSAVGMRGGAWWNVSRPGTGRQEACSALAP

SEQ ID NO: 28205 - protein, 30 aa, Homo sapiens
LVFCTSVNLLALPSKSTAFFTFFYDQGKDH

SEQ ID NO: 28206 - protein, 175 aa, Homo sapiens
VEESAEQAQRRDETRVGRNRHSWRSRQSRHSGATRLAWEREDTPGGVGRAGRPRSSSSRSCCPTCTRVGTRRHSCRSRRSRQTKEFIFSELLSNLHSRGNEKTLLEESAEQAQRRDEMLRMHHVLKEALSIIGNINTNTVSTATGARGRRLAAAKPSKRMAYGSCCTSLGAPRCQ

SEQ ID NO: 28207 - protein, 176 aa, Homo sapiens
VEESAEQAQRRDETRVGRNRHSWRSRQSRHSGATRLAWEREDTPGGVGRAGRPRSSSSRSCCPTCTRVGTRRHSCRSRRSRQTKEFIFSELLSNLHSRGNEKTLLEESAEQAQRRDEMLRMHHVLKEALSIIGNINTNTVSTATGARGRRLAAAAKPSKRMAYGSCCTSLGAPRCQ

SEQ ID NO: 28208 - protein, 113 aa, Homo sapiens
MGGFGNEGRWELCWRVSHSHASFAGICPGEEHSLMLKKKLKSSTLHSNKLKETCDAHHRGPFMTHTGCTKQHRSQTLGVQWLSFQKSLVTLQAVSRPFIKTYTGYRCSRSILH

SEQ ID NO: 28209 - protein, 154 aa, Homo sapiens
LLLLCVFYFILFILFLDFQFLFHPGKETWVSTPCPPENFPGPARSLPGTPQARRALRRFLPRRLQIFRFLLELLRQLLEEGQGSQEDFWSPPSKTLSLPSSAQGLEVSVDRAEEKPSMEPAPGADWVVAVWVVAVWAGALEVLLTSQEPARDQA

SEQ ID NO: 28210 - protein, 64 aa, Homo sapiens
MESCWVGEHIHVPGGWCTPTPQGPFQTSPCVSLHLAVHLAAPRAGMVAHACNPSTLGGRGRWFI

SEQ ID NO: 28211 - protein, 64 aa, Homo sapiens
VAPPGGPCAPERDSRHWKARPVGGRVGRLGRPRSGSGSQVAGAVATLAPTGLFPDHEGIFPSSN

SEQ ID NO: 28212 - protein, 23 aa, Homo sapiens
LSLHFPTCQVSERRTKVMPRTPR

SEQ ID NO: 28213 - protein, 121 aa, Homo sapiens
LSWMPGSRIAAQFQQDSAFPHALGGDPPFLPLTHAECRAGAWVAGGGRVGGGSSLSLCTLFLGCLVLAPGDYKSQSAVCPASFLIDPAWGRWCMVTELCILGHVVAQVGLSLAVRWGDFVF

SEQ ID NO: 28214 - protein, 119 aa, Homo sapiens
MEENNYSLLASVCYSELRSNRKILEMHVSSCKANSIPHIKLLLLMTSPFLTDRISKTLRQQTCVCLFFHFPRHQLTLPPMTVLVSMRIFLNHIGEAVILKPQVFKHDLYVLYNVQFVTF

SEQ ID NO: 28215 - protein, 65 aa, Homo sapiens
VWPQSFAVPRRPSPSHATAPHLSKSADILIFPTLSVRSPPPLDARAPGESTAGRMVGSTLTIGGN

SEQ ID NO: 28216 - protein, 28 aa, Homo sapiens
LRGPSFLISSTEMWPSSTRSTPSPMTCL

SEQ ID NO: 28217 - protein, 168 aa, Homo sapiens
LGPDGRPHPPAFRPGSLAEPEPRELPACCPSPLCCDWVVSCPAWGCFSSPSPGPAAAVTPTIHTTVLTAQPEEQRMPWVGLWGSDRGVVGRGQPWAPHRVDRQTPDCPGAGAAGTALAPDLVGLLLAAEMSSVTGLAGGGVLTTQSCSPVWGGRGRVPNVRAASGRCS

SEQ ID NO: 28218 - protein, 173 aa, Homo sapiens
VRRGGRKRNYATSPAAECTQQPGVTSGRRRGAGSRGPWPWPGTPPPTARRTTFSRQPRPARHLSPESPPLLPIHPREILKNTLYKSTCASFSPRVAPGRKERGKELKQRAFSPGEKNQDVPFSPPSVLTSAPARSPLLGILLMLLRVRRVGIICHLEFLCLADLSSDLPIYQR

SEQ ID NO: 28219 - protein, 14 aa, Homo sapiens
VTRLTSTSPDPGKR

SEQ ID NO: 28220 - protein, 115 aa, Homo sapiens
VEEMPLSRRSGDSPAPRIPGWRDASRPRGLVARAGRRTRRRALPGLAWACSEPGCFSVTTQIGGIWRFCGSPAAKLRGRRGLEACTTCSPRPSMHPGKRLCFSVRAKVCKEGGGN

SEQ ID NO: 28221 - protein, 74 aa, Homo sapiens [sequence omitted]

SEQ ID NO: 28222 - protein, 96 aa, Homo sapiens
VSACHGKCPVVTGPVEQSPFWARGNKSHLWASGYPRPLSTPAPPMFKLCAFDHLLGLMIFYANSSWTPEFNDRDANTFLASGTCVLAEHPLRFGLG

SEQ ID NO: 28223 - protein, 8 aa, Homo sapiens
MGSKNSSY

SEQ ID NO: 28224 - protein, 11 aa, Homo sapiens
LRSKRASSSSW

SEQ ID NO: 28225 - protein, 47 aa, Homo sapiens [sequence omitted]

SEQ ID NO: 28226 - protein, 51 aa, Homo sapiens
LLRKPSHAFPCCIPAHSACSCCLQDFISMPHCVKAVLQEITKTFSCTYYTA

SEQ ID NO: 28227 - protein, 212 aa, Homo sapiens
LDACEQQAVTISCFYDVTRNSYGIISVDSAKVTINNTITQNMTFTNTSQTSGQWADSRANTVFGLGFSSEQQLTKFAEKFQEVEEAAKTAKDKTQENMEPSSNHPENQGVEPHLLLRHPVSTGRTMKGLSGRCSRHAPAVWEPQAEGGLDAELPTGRGGRWSCRPGGRPTSGCPRRCRSRRPVRSRGRGRESECDCVSEKMEAAERGSKPGR

SEQ ID NO: 28228 - protein, 94 aa, Homo sapiens
LRAAAASRPQKVCFCPFLPAHPLHISTYLCIIQHPAEEDKMLRTVPLPAACLPQDKRKVKTGRRFSEERDPELSTVCRKFGTLMLYPGANIRSC

SEQ ID NO: 28229 - protein, 68 aa, Homo sapiens
LPAAAQRAGREARRKPRAWRGQAPRAAGMRPHRPGKLAPLRILLPDSFPSPPPILKFYLGRLYQFRTR

SEQ ID NO: 28230 - protein, 74 aa, Homo sapiens
VLVALCPRGRGFCISCLCPTPKVRRNMFPVASMSFIALHPLLPEAALGVPGQSPHRPLWQTQCCVAPPQPRAEF

SEQ ID NO: 28231 - protein, 188 aa, Homo sapiens [sequence omitted]

SEQ ID NO: 28232 - protein, 39 aa, Homo sapiens
LQNILLKRGNTRSSMNVIGYRNSLSLQDFLESYIFVHQT

SEQ ID NO: 28233 - protein, 26 aa, Homo sapiens
VRIKRRAMTDSEDFVLKNLRTQDRVK

SEQ ID NO: 28234 - protein, 36 aa, Homo sapiens
LLVHGNWAFSIFSSIQMASFDLLTFYRLGATCTSVC

SEQ ID NO: 28235 - protein, 168 aa, Homo sapiens
VDRGWEAAGLSPTRRRNVTRCGKRGRSPEAASFSSGARRGSRGKPRGPPSRPAAPLWRRAGAHATWFHPLPLPCPRCAARQRAFDVAAGATGPPSPDTHSPAMSAFPRPGLLTAAAAAALRPEIRRPRPCPGRELRAPPQRARAGQQGAQRASSGACGSRVVGRPSAR

SEQ ID NO: 28236 - protein, 435 aa, Homo sapiens
LPPAGSPPRTPAPAPAAAPDPAPCAALAAGHGRQLRPGPRDPAPSAQRRRPASGSSAGTPASAGPGARPAEPVQPRQARRPTMLLLSPRSALVSVYCPQIFLLLSSGSYLALSSVVALGANIICNKIPGLAPRQRAICQSRPDAIIVIGEGAQMGINECQYQFRFGRWNCSALGEKTVFGQELRVGSREAAFTYAITAAGVAHAVTAACSQGNLSNCGCDREKQGYYNQAEGWKWGGCSADVRYGIDFSRRFVDAREIKKNARRLMNLHNNEAGRKVLEDRMQLECKCHGVSGSCTTKTCWTTLPKFREVGHLLKEKYNAAVQVEVVRASRLRQPTFLRIKQLRSYQKPMETDLVYIEKSPNYCEEDAATGSVGTQGRLCNRTSPGADGCDTMCCGRGYNTHQYTKVWQCNCKFHWCCFVKCNTCSERTEVFTCK

SEQ ID NO: 28237 - protein, 133 aa, Homo sapiens
LRLQGLSTASGQPQQRPPVSAGQRARPVPRPPSSSAGPGPEGPEGAGCVLRLSAISAGPELRPDHFLLEKSEICIDEKKKLFLAKNINQPHLQSDPPNSGRIAVNDSSYFSTSLSAFDAVSVLDFDHYNSHPP

SEQ ID NO: 28238 - protein, 51 aa, Homo sapiens
LLIRVLNVAPCFLHLRRLKVLSVLIARVLCSMITILFLPVLLRSSNNSRVD

SEQ ID NO: 28239 - protein, 182 aa, Homo sapiens
LRGALGLALRGYECFLEFFLGVWSPLRRRQAVFLEDMESFSRTQNSSRDLEPFPGHGELPEGLESPCIMESFLRTGAYAGTESLRTKESLLQVWSLSWDAEPSQDMDSFPGRQSPVRSTASFQRRWSLSWGNQISRFSQRLSNSGLRLPSQRQRLGCAVLWRRDCRMDGAGTGAVWVAGILV

SEQ ID NO: 28240 - protein, 188 aa, Homo sapiens
MQGHTRWIGVVEPKRAVSREDSQRPGAHLTVKKIFVGGIKEDTEEHHLRDYFEQRGKTEVIEITTDRGSGKKRGLAFVTFDGHDSVDKTVIQKHHTVNGHNCEVRKALSKQEMANTSSSERGRSGSGNFGGGREGDFGRNDNFGHGGNFSGCGAFGGNHGGGGYGGSRDGYNGFGTDGSNFGGWWKLQ

SEQ ID NO: 28241 - protein, 210 aa, Homo sapiens
LGLAAPLASPSWGLCHPGGPGPDLRRLPLGLEAGHEGADGSVVSPERTLLSCGLAEPAHRPSDSWLTQPRPEAPREGQARLCRNLPMGLGTWPSRKACLRGAALHRGLDPPLGTRSEEGEALGRRHRSESLQKSQPRWTARCTCQPRRSPPRCRSPHPPHPCGENSAGFPVVGFVTLKAEAADWELNPRGRRSTHWKPSSCCCSQQFFFL

SEQ ID NO: 28242 - protein, 26 aa, Homo sapiens
VVFYMDTRDRLLPLEGAGSSSGLPSS

SEQ ID NO: 28243 - protein, 33 aa, Homo sapiens
LELPFRNSLEPEKVTLPRINFFTPEQGRAEGWI

SEQ ID NO: 28244 - protein, 79 aa, Homo sapiens
LELPSYSTTREVAWQSVLMTRPRSHSQIQFSLLLNRFRRLGDLENEINEMLLGIFINHILMLPQIMKEYFAESSQSKRG

SEQ ID NO: 28245 - protein, 120 aa, Homo sapiens
LRVTAEIPSGVFLGGSEQRWTYPKGDGPTRPSASSILSLRKVQQQRKRCTFLSESHLCTQELLQDVLQTTQMGMKRSTNHRAVGSPTPHAPTPEHDHPSEPDSAGQPPARLQRPRGAKKF

SEQ ID NO: 28246 - protein, 47 aa, Homo sapiens
LPPRLMHKAKELPRSLRYRVTLSSGEKGESERRVLCILPPCLSPSCL

SEQ ID NO: 28247 - protein, 27 aa, Homo sapiens
VAHQSTQKNQYGIRGQWPTLNKDMSDV

SEQ ID NO: 28248 - protein, 316 aa, Homo sapiens
MGRWLCFSESYQASEKDKFTEGRDRQRKMLAKRKPPAMGQDPPATSEQKQWKSRTNGAENKTLTLAEYHEQEEIFKLRLGHLKKEEAEIQAELERLERVRNLRIGELKRIHNEDNSQFKDHPMLNDRYLLLHLLDRGGFSKVYKAFELIEQRYVAVKIHQLNKNWRDEKKENYHKHACREYWIHKELDHPRIIKLYDYFSLDTDSFCTVLEYCEGNDLNFYLKRHKLMSEKEAWSIIMQTVNALKYLNKIKPPIIHYDLKPGNILLVNGTVCGERKITELGLSKIMDDDSYNSVGGMELTSQGAGTYCNLTPEFCG

SEQ ID NO: 28249 - protein, 63 aa, Homo sapiens
VAESQPWALSRVPFRKRPPIRRLRAAVIPWFNKAAARSPSPLPRLLPRRARAGRGGAWSRAAA

SEQ ID NO: 28250 - protein, 151 aa, Homo sapiens
VCRIFYDMRVRKCSTPEEIKKRTKAVIFLSQCRQKVHHVEGKEILVGDVGVTISEPFKHFVGMLPEKDCCYALYDASFETKESRRIDVFLWASELAPLKSKMIYTSSKDAIKKKFQGIKHEWQTNGPEDLNRACTAEKLGGSFFFFFEMES

SEQ ID NO: 28251 - protein, 52 aa, Homo sapiens
LRFRLRNLPQSLRTVILPERNEEQNLQELSHNADKYQMGDCCKEEIDDSIFY

SEQ ID NO: 28252 - protein, 21 aa, Homo sapiens
MEYDGSLFQAVGIGTLLTAAR

SEQ ID NO: 28253 - protein, 96 aa, Homo sapiens
LDPPVGPGEPTEGPGRKEATEREAAPHHVGLPWPPATRLLRVLFLSFFEIFFPCVYFLLFFKIRRKKVPSKWAFYKKYESYFSCPAREGGGDRAPL

SEQ ID NO: 28254 - protein, 104 aa, Homo sapiens
LEGPALRAAFGLSEAEFDTACVTKLFPTRSHTVAAQVENYGMPFSRTEDGKIYQRAFGGHSLKFGKGGQAHGCCCVADRTGHSILHTLYGRVGLTLLALFFSFF

SEQ ID NO: 28255 - protein, 109 aa, Homo sapiens
VQPLCESDPAVQASRGPAGPLLSPSRAQLPSLRPGLAWRFLPGPSAFPWRCGRPSPHPTRHAAVLGPGYPGRLPPLGPPLLSGRDFSLVSEFLGSSWPLQPCWRLPCGI

SEQ ID NO: 28256 - protein, 415 aa, Homo sapiens
LTDPSKLDSGKEPHISLIPNKQDRTLTIVDTGIGMTKADLINNLGTITKSETKVFMEVLQAGADISMIGQFSVGFYSAYSVAEKVTVITKHNNDEQYAWESSLRGSFTEYREFYKSLTINWEDYLAVKHFSVEGQLEFRAFLFVPRLAPFELLETRKKKNKIKLSARRDLIMDNCEELIPEYLNFIRGVVDSEDLPLNIFRETKDQVANSTIVQRLWKHGLEVIYTIEPIDEYCVQQLKEFEGKTLVSVTKEDLELPEDEEEKKKQEEGKQKTKQKKNQSLRTSAKSTYGWTANMERIMKAQALRDNSTTGYMAAKKHLEINPDHSFIDTLRQKAETDKNDKSVKDLVILLYETALLSSDFGLEGPQTHANRIYRMNKLGLGTDEDDPTADDTSAAVTEEMPPLEGDDDTSRMEK

SEQ ID NO: 28257 - protein, 122 aa, Homo sapiens
LSQKPQQRSHRTGFWRPSRSPCGGAGKRRRPGSSPATGPEERLAPPAQRRRRPVTPGATGRNWGSCDTESLTSATWVLRPLRKWRRRPTSGAATERPRLAKWWCREPASDASRRGCQGQHSF

SEQ ID NO: 28258 - protein, 100 aa, Homo sapiens [sequence omitted]

SEQ ID NO: 28259 - protein, 204 aa, Homo sapiens [sequence omitted]

SEQ ID NO: 28260 - protein, 282 aa, Homo sapiens
VERNLMRVLNVARHSVVVHTLLSIKEFTLVRSPIHVLNVERLLVRTHILLYIRESILERNLMNAMNVVGPLVRVHILLNIKECIQEKNSMNVMNVRKPSMITQLLFNIILSILQRNPMNIMTGKTFSYCSDLIQHQRMHTGEKPYKCNECGNAFSDCSSLIQHQRTHTGEEPYECKQCGKAFSRSTYLTQHQRSHAGEKQYKCNECEKTFSLSSFLTQHMRVQTGEKPYKYNEYGKAFSDCSGHFQRTHTGEKPCECNDCGKPFSFCSALIQHKRIHTRKKP

SEQ ID NO: 28261 - protein, 55 aa, Homo sapiens
LFCFIFVFLYLLGLFCLNPSTAGRLINHTENVEGFMGEGVEMWVFETKVYKQMNC

SEQ ID NO: 28262 - protein, 43 aa, Homo sapiens
LVTSSAVAGRGSFASEGCLAGPNSVAPRPPVSAFCIAASAAST

SEQ ID NO: 28263 - protein, 20 aa, Homo sapiens
LESAHQWKTLKVVVTDLIKL

SEQ ID NO: 28264 - protein, 16 aa, Homo sapiens
LLSWSPHTSGRLSKWL

SEQ ID NO: 28265 - protein, 132 aa, Homo sapiens
LMYQHQRVSERFDVIHLDPYGSPAPFLDAAVLAVSEGELLCVTRTDTAVLARNSGEMCYSKFGAMALKSRACHEMALRIVLHSLDLRANCYQRFVVPLLSISADFYVRVFVRVFTGQPKVKASASKQALVFH

SEQ ID NO: 28266 - protein, 65 aa, Homo sapiens
LSSRGFPLLFLPPPAPVHLQMPSPGPLKSQSCPLFLLPPTSPCSPAAALPWSRVPGAAPCSPTSH

SEQ ID NO: 28267 - protein, 267 aa, Homo sapiens
LRGVAEASGVHWELPQGNRPGRNGRFGEGRTIGNQPQGAGFQDSAHSGQSHHHIAYSSPQMEQERGRLYPPGNAPGGQGSRVSTGSGCSPQLLFSSQPTQPPRETEERQTRRWLRGGLHPSRPSHLILLPYAVGANVHPILQMSKLSFSEAGAFLEITEQAPSVSTVAGRSWLYAFLSSYSVVYKDRRDGVSTWTNPGWSQTPGLKQSTCLSLPKCWDNRREPPHPAFTWFEPPHPASHMVLLTGAPHMCGPLLRGLQLLFREGVTR

SEQ ID NO: 28268 - protein, 319 aa, Homo sapiens
VCARARAHGSVWGNRKFCRLGEQYGKSEPRRQRWRAGEAARGRSGGRVSRGAGTPRGTPGCGGAGLDARAGGRGWPWMGPAGPRISRGPCGQHCLLEPGMGEWRGPCCPRGLGTLPLPTPTRAAAGRSSLRSSGPSVTLSRDAVIHGGGGGGRGRDKHGSGEVLNSVLLSCLSLGTFSPLGSVLDFAGCENLLTSESSVEPRLGLWSAYFLQSDCSCLRWSLSVPLWGTSALISALTAAVRAAGNWEGRAGALGPGARPSWDTREDGGGEEVGSAAGELGIMQMGKENLRPRPSAKSSLGICRYCGHVMEGSGKYGLIF

SEQ ID NO: 28269 - protein, 233 aa, Homo sapiens
VCVCECVCVHARARTAVFGEIESFAGWGSNTEKVSRGDNGCENLLTSESSVEPRLGLWSAYFLQSDCSCLRWSLSVPLWGTSALISALTAAVRAAGKWGAPSGGRVAVSLLISSVTFKLSLEATAAAGHVRRALGCWGKISSAGSRDRAGGRRGTAPRPRLGTWEGRAGALGPGARPSWDTREDGGGEEVGSAAGELGIMQMGKENLRPRPSAKSSLGIWHVMEGSGKYGLIF

SEQ ID NO: 28270 - protein, 43 aa, Homo sapiens
MALASGEVIPWWKASHGKQACKTEEKGAKHAKANPLSRKMAGL

SEQ ID NO: 28271 - protein, 41 aa, Homo sapiens
VDFLLLRCGQILQDLTSKKTGGGAGGGGEDVWPMHAECKAA

SEQ ID NO: 28272 - protein, 309 aa, Homo sapiens
LHNFSLPEEDTKLKIPLIHRALQLAQRPVSLLASPWTSPTRLKTRGAGNGKGPLKGQPRDIYHQTWARYIVKFLDAYAEHKLQFWAVTAENEPSAGLLSGYPFQCLGFTPEHQRDFIARDLGPTLANGTHHNVRLLMLDDQRLLLPHWAKVVLTDPEAAKGLCGFQVLGAECAARLLGSRDAVQPQHHHSLHTSLPLLQLLRHLQLPQTSQLPLRCLDLHTPNSLATKECAPHRADLPTAASPTRDPYLHSLGTPSVAPLSPCLCPYPRTSCTMWSAGPTGTHHCRHHQAHVLQTAHVLPPWPLQQVHS

SEQ ID NO: 28273 - protein, 77 aa, Homo sapiens
LGNADIEGQENISPGYTAFQVGFHVVEDNIISTKGENPWKLILFQQKSRMGLVARVSQTRERHSPSIDSSSVFKREI

SEQ ID NO: 28274 - protein, 61 aa, Homo sapiens
LAGTIARWRRSPSMASASCSRGRAVVPPELGRMWIGKVDINQLIIPHRFVFSRVSRSFSQN

SEQ ID NO: 28275 - protein, 8 aa, Homo sapiens
LKLSFPIM

SEQ ID NO: 28276 - protein, 24 aa, Homo sapiens
LRVLCTISTMRAGPTLAFLQLPLG

SEQ ID NO: 28277 - protein, 17 aa, Homo sapiens
MEAGLKFYIRSYLFQLC

SEQ ID NO: 28278 - protein, 82 aa, Homo sapiens
LLVLGANPRLALLPARPGINGKGSRDPQPGLLPLPTGPSQVRTPSATLPPLCSLTLTAKSPARAWHGLACRFPTRGWPCRCQ

SEQ ID NO: 28279 - protein, 23 aa, Homo sapiens
MKCGPVAPHCRFSSFLPPFRKLN

SEQ ID NO: 28280 - protein, 23 aa, Homo sapiens
MKCGPVAPHCRFSSFLPPFRKVN

SEQ ID NO: 28281 - protein, 14 aa, Homo sapiens
VEPTHVPVTEVRSE

SEQ ID NO: 28282 - protein, 114 aa, Homo sapiens
VIVDSADPAGPEKEIPGPWLLGAMRFRFCGDLDCPDWVLAEISTLAKMVECTGSSLGGGGVLGVGIVGVEDGEVSLGLGPQCSQPVLPCFVTLISGWPALSQSPGRRGEVCQPG

SEQ ID NO: 28283 - protein, 505 aa, Homo sapiens
LSTHRLGLAAVLCVASASAAWEQSAVGRAVSCCRPRGWPFRTLWAVSAALWSGRGPILASKTPSLPWSTQLGAWWKDPTAGGVTQEASPGAWHWGRQWEVSRTTSSTCLIPRPRSPLHVRLWGGTSDLVRGPGAPPPALLQSKAQWQTPCPAQGGVPALPRTLQPLGPLHRGPGWGRTALPPGASGRAGPKCSSATAPAPGGRRAGPDPSARGPHQLPAAVLTGSSALPALQAGGWREVPCPPARGRQAPPPPDADKPTALQPRGAHLPPPQLWLPPQALLGRPVPQAVPWGAHLPLEAERGQAGLRELLARLAPPHGHSQPSALPGWHQLSWRMSCALWTLLCAPEHGRPCYHTLGLEVIGSEQMWGWPARLAALHHWHCLPWDPLPTCCGHHGGEHSNPRCPEHCPMPTLCTQVQRVRPPQQPQVEGWSPWGLPSGSALAVGVEGPCQDEPPSPRHPLAPSAEQHPASGGLKQSLTPVPSGPGPSLPEPHGVYLRMFPGEVAL

SEQ ID NO: 28284 - protein, 124 aa, Homo sapiens
LNRTEFEDQDDEARVPYEGFRPGVYVRVEIENVPCEFVQNFDPHYPIILGGLGNSEGNVGDVQMHLKKHRWYKKILKSRDPIIFSVGWRRFQTIPLYYIEDHNGRQRLLKYTPQHMHCGAAFWA

SEQ ID NO: 28285 - protein, 117 aa, Homo sapiens
MAFPQGHLIFSDVAIKFSVEEWKCLNPEQRALYREMMLENYRNLESVDSSLKSMMEFSSTEQGNTEVFHTGTLERHDFCFPEIKKDIQDFEFQWQEIERNGHEAPMTEIKELTGSTD

SEQ ID NO: 28286 - protein, 58 aa, Homo sapiens
MAFTLTSPWAYDVTRSHHAQRPGPSRQNRGLSVEPLARPHDGGARKRGRNRRGPWTEQ

SEQ ID NO: 28287 - protein, 59 aa, Homo sapiens [sequence omitted]

SEQ ID NO: 28288 - protein, 32 aa, Homo sapiens
LRGAGARVRGPLGDRLSLARLSAPGSAPRVTA

SEQ ID NO: 28289 - protein, 76 aa, Homo sapiens
LGGLAGARHKRPRRHVMRALVPRSPRLSERPGCGRGGLALLIHLEHFCKDRRGSSYFRASLGQLGSDQKSQAEETQ

SEQ ID NO: 28290 - protein, 212 aa, Homo sapiens
VDQSGLGLDPSPPPPSRNNPETSPTPTPNYYFEGARSGDRKGEGEKSETEDNPKGLTLPDDSTQLIIISLSVCLSLRLVSESGSGCWQRRPRGERLEVTAWAAAAFPPARGPGSLRLLGSWCYRSHRSGRASSRASRPANQQPRLAAAAAASGFSALSLQNGSPSRRCEKALSASFSSPLLRRPLPRSLGCPFGGVLSLSSSSPSSLPPSSS

SEQ ID NO: 28291 - protein, 18 aa, Homo sapiens
MTLLHYFDGWRIFPSVCI

SEQ ID NO: 28292 - protein, 40 aa, Homo sapiens
LSQPIGWLPRQFRRASWGLQASDKLLQYDITHLATPATHA

SEQ ID NO: 28293 - protein, 90 aa, Homo sapiens
LCRVWFAIKRWQFSHNQGQGEGEAPRRGRGPASAALSLEGDWLERLPAGSGMNGGDRGLWVVRASCCLLIWSMCHSSPGEPLCVTANLSH

SEQ ID NO: 28294 - protein, 342 aa, Homo sapiens
VEKMSAECCSSTQTRRGRWKTLRNSWRELIRVGAWPAVCATDLLALCILRPPGEFGVDIALGSSQRFGVPLGYGGPHAAFFAVRESLVRMMPGRMVGATRDATGKEVYCLALQTREQHTERDMATSNICTAQALLANMAAMFAIYHGSHGLEHIARRVHNATLILPEGLKRAGHQLQHDVFFDTLKIQCGCSVKEVLGRAAQRQINFRLFEDGTLGISLDETVNEKDLDDLLRIFVCESSAELVAESMGEECRGIPGSVFKRTSPFLTHQVFNSYHSETNIVRYMKKLENKDISLVHSMIPLGSCTMKLNSSSELAPITWKEFANIHPFVPLDQAQGYQQLF

SEQ ID NO: 28295 - protein, 195 aa, Homo sapiens [sequence omitted]

SEQ ID NO: 28296 - protein, 234 aa, Homo sapiens
MEMGRRIHSELRNRAPSDVKELALDNSRSNEGKLEALTDEFEELEFLSKINGGLTSISDLPKLKLRKLELRVSGGLEVLAEKCPNLTHLYLSGNKIKDLSTIEPLKQLENLKSLDLFNCEVTNLNDYGENVFKLLLQLTYLDSCYWDHKEAPYSDIEDHVEGLDDEEEGEHEEEYDEDAQVVEDEEGEEEEEEGEEEDVSGGDEEDEEGYNDGEVDGEEDEEELGEEERGQKRK

SEQ ID NO: 28297 - protein, 29 aa, Homo sapiens
MFSIFLLKFPYFHMQEEPQSCILMVATMP

SEQ ID NO: 28298 - protein, 87 aa, Homo sapiens
LVSPAYKSGVGDRLVTSDDFKEQNKRFSRACPTAPPARIMENCQCTPRAVAHCTQLMARRRLGVAGAPCPRPYAQINAQTRSRLLVS

SEQ ID NO: 28299 - protein, 59 aa, Homo sapiens
LVIGLGRTPLSQWNLEHTLEPSSSSPDLCQTVSGTEQGLPSCSHQNLPHEMKGSPLHRL

SEQ ID NO: 28300 - protein, 145 aa, Homo sapiens [sequence omitted]

SEQ ID NO: 28301 - protein, 60 aa, Homo sapiens
LSLMFKQSLSMKLGGDRVSCQFLTATSHQWLHSVSLTQHMAQECLPSVSVSTAAIPRCWS

SEQ ID NO: 28302 - protein, 44 aa, Homo sapiens
LQWQVFPSFRQVCIQERGGQGQKDAGRLLISTEELISCETLTVI

SEQ ID NO: 28303 - protein, 13 aa, Homo sapiens
MSYNNRMQESTYQ

SEQ ID NO: 28304 - protein, 91 aa, Homo sapiens
MPLWEAPAAGAAQPRCCPCGEAGSARHSAGRPGSGSGHHEDPGESAGEAPPRPWANGPSFLDVDPPTGTSLGSWPWSQTSALLEAEGTHEA

SEQ ID NO: 28305 - protein, 113 aa, Homo sapiens [sequence omitted]

SEQ ID NO: 28306 - protein, 89 aa, Homo sapiens
LLMRPASHPRCWGRSWIFMPAASTQGELRKCLLGARNTHLSGNAAQRVPASFSSPHSKWSRSGSNASDKCVPTCQAHPSCRPLSWCHPA

SEQ ID NO: 28307 - protein, 52 aa, Homo sapiens
LQLMEDEPQLLKMSHLSSSFLPSFLEISRAFGETDFPNPLPGRCPCFCGCCC

SEQ ID NO: 28308 - protein, 190 aa, Homo sapiens
VEVMRGSTDPGQCAAQRRAAKPSGRGSDVTARDAEAGQLADGAGRPLAEGPRPHLVRQGPGAMRGPEPRGGTGSRAGGGARGAAGRPWLQEREEAAHGPEQGGLRGGLQAGRRRPRGEGRGPAAGAGERKWLRGPRGDVPRGQGGRQTGAVCVHASPRRERRARDLGSLGQEEAAGGGSDGKQVRLCHLG

SEQ ID NO: 28309 - protein, 34 aa, Homo sapiens
LAQRASTFSLKPKRSLRKTRCLCSLQAEVTGLSK

SEQ ID NO: 28310 - protein, 26 aa, Homo sapiens
LTQVLHRSGFSESRKTAADRIPGTSV

SEQ ID NO: 28311 - protein, 32 aa, Homo sapiens
VVVYSSVELRAPWTSQVFRVFHLELYKVQKTW

SEQ ID NO: 28312 - protein, 164 aa, Homo sapiens
VGSPTRPSGPPPPAPCPSQPTRPSRARRGGSSTATGRCQPAPDGHRGAGLRRHADGHRADAGERRGPGAWRRPAAPLLLPGAGRAGRGRASRGRQPGVSLPGGRLGARPAEPLPWSLRLPAATPGGRLPRRGRVLPAARGRRGLPAGRGLRRPGPARRALPGAA

SEQ ID NO: 28313 - protein, 49 aa, Homo sapiens
LPSFIQQLFGKCICCSEFNQKRIPASVPGSFIVPSPLSLSWGGVKRSRG

SEQ ID NO: 28314 - protein, 84 aa, Homo sapiens
LPLYGHPLAWTAGHTPPTGVQGAGGGHPPWDLGAPQTTLDSGPPTLRPVLPPRRLQAPPSTFFCMFFFCWKQTRFILNIIYLCI

SEQ ID NO: 28315 - protein, 215 aa, Homo sapiens [sequence omitted]

SEQ ID NO: 28316 - protein, 219 aa, Homo sapiens [sequence omitted]

SEQ ID NO: 28317 - protein, 320 aa, Homo sapiens
LQKVRAKETRKWALSRLKLKLNKDIVISVGIYSLVQKALKPPSIKLYRKTNEPVKTKSRKFNINTGSLLLPSDTKRSQIYGSHQIILEKEETEELKWFDEPALMLMVFKPLVMLKEHHYPRPSLFTYPEESPVNGSSTLFSALLIKCLEKVVIALCRYTPRRNIPPYLVALVSQEEELDDQKIQVTTPGFQLVFLPFADDKRKVPFTEKVMATPEQVDNMKAIIQKLCFTYRSDSFENPVLQQHFGNLEPLILYLMEEQAVDLILPKVEEMNKRLGSMVNEFKELVYSPDYNPEGKITKRKCNNEGSRSKRPKRSIQKRS

SEQ ID NO: 28318 - protein, 118 aa, Homo sapiens
LREQHHQHHAITIPNHGGFSQLYTKGHHYPSKRETWTHVPKRRLPAERAANRNHRSWDCPDPVLPVDFKSGGHLGFCSLPLPLQSSNFHHFDVWVPIFRSSVFWHYWIPLNYLWKTIN

SEQ ID NO: 28319 - protein, 55 aa, Homo sapiens
VSSPGNGLSPSSWRSELACEFQHECTAEVRFGAVVCRGARSHSFYLEREILQLRE

SEQ ID NO: 28320 - protein, 68 aa, Homo sapiens
VQCLVLFAGVSPPGFACPRERHWRPCGLCCTSDGFAPASALSLLQHSDLHPLRGFHCPRGENAPGSVT

SEQ ID NO: 28321 - protein, 7 aa, Homo sapiens
LNFMSSF

SEQ ID NO: 28322 - protein, 109 aa, Homo sapiens
LRSFLVVVQWLMQVPLTPLWELGLGRVVENADALAIAIVLNNQWSLVPNRGILYFLPVSMKLGGDRVSCQFLTATSHQWLHSVSLTQHMAQECLPSVSVSTAAIPRCWS

SEQ ID NO: 28323 - protein, 132 aa, Homo sapiens
LPAKVLCVALEAEIWGNRQVLCSEVHLPSPEPPPSLGRLRGLHLCSLAAAGLCYDIFTVLLAETCVPGMPNCRESRQDRLRGARRPLCVRGCIVTRAMKPVGRWSEAPAAAAAFVRGLESRIRPASLRRGRG

SEQ ID NO: 28324 - protein, 120 aa, Homo sapiens
LAASPPGTVKAEEHQPQNINKFERRQARPADASAARGGEETNDLQQKLEEVRQPPTRVRPVPSLVTLTSLVKFVGNIYTCPQMQVLRGGIPGPPLYPGRVGAALTAAHPGDELLQSGPPA

SEQ ID NO: 28325 - protein, 42 aa, Homo sapiens
LSAGFTRTLEPKRALLLQCSAHKSLLVKEWDKTHLYAKPALQ

SEQ ID NO: 28326 - protein, 93 aa, Homo sapiens
VSVRPGPGALRRQTGHGPGAAPMRVPGGGARAAAAGPWGRRCCRSCARGCGPRSPAVGSSTRTRAPSPTASTSMSGSSCSSFPSYCTWSCLPA

SEQ ID NO: 28327 - protein, 55 aa, Homo sapiens
LFLFPGLRLRQAGLAPSAPCPRPAASSLHSHFLSSAMGALEARPGRSRPWGAHRP

SEQ ID NO: 28328 - protein, 66 aa, Homo sapiens
LLRTSPRPLREGSSAEDITSVWSLPHPPAAKPRPLPVSSGVSRATHPVGVPRGLPQSSPHTQQHQW

SEQ ID NO: 28329 - protein, 124 aa, Homo sapiens
MTASTSPTRWGRAGLPPQRRARGGRTGARPQRPPPQVRGNKPSCLLAEQNRGQFFTVYKPNIGRQSQLEALDSLRRKFHRVGGRRAQLSLGLPALTPPRLMRPCVPRSPRRRPRSPGRVATLCR

SEQ ID NO: 28330 - protein, 22 aa, Homo sapiens
LAGRPVLRTPYFVVAAARSSAV

SEQ ID NO: 28331 - protein, 59 aa, Homo sapiens
LRRFWRGCPFLASALRLEAKLVLCLLSIAAKACCCHSGVSLSLSLFHAALSTPSWDGQL

SEQ ID NO: 28332 - protein, 102 aa, Homo sapiens
LGRPSPRRDALQANGEGPEVGPGTEEPAHRLPVGSGSAARSQKGEGRRELACGTPDRRGCAFPAPGPSRHTRSSPLARANAQDDHHPRVCHHLRLERSFMQG

SEQ ID NO: 28333 - protein, 18 aa, Homo sapiens
LLLVTFLSMDDLLGTQNS

SEQ ID NO: 28334 - protein, 104 aa, Homo sapiens
LAPGAAGGCRGRRGRSPQLLTLQGPGEEPVRPLVPKPPPLTWVCLAAGALQGQHSWGAGQAATPGTPLRRDFLFLKAVDLQRGLMLPCTALAPAGPPGWAVAGG

SEQ ID NO: 28335 - protein, 52 aa, Homo sapiens
LGKARQAISSHLTLLAPVVMASENVRCCIAEEARKAHLASCSSASRGSTFRS

SEQ ID NO: 28336 - protein, 144 aa, Homo sapiens [sequence omitted]

SEQ ID NO: 28337 - protein, 203 aa, Homo sapiens
LPEEPRGRHTRPPPPPRSLALTPGRRRRAARAPPAPHGRPQHGALRPPRRCPARSGAPRRGISGQDKTPKLLPQHTARDPQTQLAPSPPTCHSLAPPTARPPWGAGHGVKGQVLRRVSWVLCPRAWVAGGGWPVGVPGGPVCPPQSLGVLEGILDGIEVNGTEAKQGGVWVRPRGEQCQVTRWKAKKKERPMFPENQHVRVYP

SEQ ID NO: 28338 - protein, 33 aa, Homo sapiens
MRVLEVEYIYTYKIGWEPRVPVCVDLGLIQSAL

SEQ ID NO: 28339 - protein, 61 aa, Homo sapiens
LALETKVLVESYTFPDGHIIKVGGERFEAPEILFQPHLISVEGVGVAELLLNTIQAADIDT

SEQ ID NO: 28340 - protein, 37 aa, Homo sapiens
LGARGPPALARPGTPPDPDFLLRGPSPPAEAVTSDPW

SEQ ID NO: 28341 - protein, 692 aa, Homo sapiens
VDLHPNRSSARIPSPWIPVEPAGKLAPEGVELEFRWPTPSESCRLVLSTQQKFVASQFLVLRRGEERNLTLNTRSSQGAISFNFSSLLPFAMKRKQKRFLQMTLLFTVALIFLPNVGLWSLYKDKHLVKSAEPGEQQTFPLGLGDGQFYSWTDGLRRKDWHDYESIQKEAMRSGKGEHGKPYPLTEEDHDDSAYRENGFNIFVSNNIALERSLPDIRHANCKHKMYLERLPNTSIIIPFHNEGWTSLLRTIHSIINRTPGSLIAEIILVDDFSEREHLKDKLEEYMARFSKVRIVRTKKREGLIRTRLLGASMARGEVLTFLDSHCEVNVNWLPPLLNQIALNHKTIVCPMIDVIDHNHFGYEAQAGDAMRGAFDWEMYYKRIPIPPELQRADPSDPFESPVMAGGLFAVDRKWFWELGGYDPGLEIWGGEQYEISFKVWMCGGEMFDVPCSRVGHIYRKYVPYKVPSGTSLARNLKRVAETWMDEFAEYIYQRRPEYRHLSTGDISAQKELRKQLKCKDFKWFMAAVAWDVPKYYPPVEPPPAAWGEIRNVAANLCVDSKHGATGTELRLDICVKDGSERTWSHEQLFTFGWREDIRPGEPLHTRKFCFDAISHNSPVTLYDCHGMKGNQLWGYRKDRTLFHPVSNSCMDCNPAEKKIFMARCDPLSETQQWIFEHINMTVLEKFNHHANS

SEQ ID NO: 28342 - protein, 227 aa, Homo sapiens
LGARRGLRPSRPSSRHRNRVPAPPPGRPLATPHRRRFPPDPALTCPGLGQDQGPREQQKQGSGRHDTILGDWEESESRWVRGNFRTGTAATLIGFSRNPTLNGSENWGSPVSTQEEGPDTGWEREKRNPAKMGNAQRWASPIHTPPLGPEILRATPEALGLRPDPATSVPSALSQCFPESWPRSCLRNQGETLGMGPVPLSSLCITESPSQNWTPCLLLLTCPRGLF

SEQ ID NO: 28343 - protein, 74 aa, Homo sapiens
LGSLRGSVVSPGKTTSTENAEREHLDGAPKGSVQKDMFVESSYREKIKRFDDFSKIMNSEASGGFSVWPLKEGL

SEQ ID NO: 28344 - protein, 12 aa, Homo sapiens
MLYLKNTTSQRK

SEQ ID NO: 28345 - protein, 208 aa, Homo sapiens
VAPEKSNLVHSLQVAQQQAEELPQEREKLQVAQEELQRQRDRLEEEQEEAVQNGARVRRELERSHRQLEQLEGKRSVLAKELVEVREALSRATLQRDMLQAEKTEVAEALTKGEAGRMELELSVTKLRAEEASLQDSLSKLSALNESLAQDKLDLNCLVTQLEEEKAMLQGRQRQAEQEATVAPAEQEWLEELWLEQEVARQGLEGSL

SEQ ID NO: 28346 - protein, 25 aa, Homo sapiens
LSYLLKVWRVGLTTLCGASFKEAKV

SEQ ID NO: 28347 - protein, 139 aa, Homo sapiens
LMLPQNSAPCHQEAVNTGLHSYAYPYSNSSYMYFFRRGNKTARWEGVSGKLHLACALGWNLRKLMTFVAGSSLAPPLPVWNLKFHRLGRKRSSRDSGFAEHPCFPVFPFSPNKTLLHSPFKPSASLNFCGCGTDKDAFS

SEQ ID NO: 28348 - protein, 41 aa, Homo sapiens
MNGPLKESYNTIDPPLRHKMAHEDIEPPSTCSTESYSYKRF

SEQ ID NO: 28349 - protein, 62 aa, Homo sapiens
LLSGECCAVEYCEVCCEVCLVIPESRLHSCPNIEAHGSYGRSESTANFCKCSHISYKFHFSK

SEQ ID NO: 28350 - protein, 157 aa, Homo sapiens
MPSRGGEGGWRGEVWGVFCGAPQTHSLPGGQMQVGRGLAEWRKAERSQQGEKPFTPQALQELGPCLAATWPHPSWGSQVSSDPWAWASAPPNPALVSLDSAPAVFPTAVTTTRNATWSLCTALFMCLCGAGPSWFCSLLYPDAYNHPCHIQVLNKHL

SEQ ID NO: 28351 - protein, 47 aa, Homo sapiens
LGGGPGLWLCPPPKGRTGWDQVSLSSLTQHLPGPERTPGALKACPAA

SEQ ID NO: 28352 - protein, 11 aa, Homo sapiens
LTADPGASAIW

SEQ ID NO: 28353 - protein, 778 aa, Homo sapiens
MEEPRATPQLYLGLVLQLLPRVMAALPEGVRPNSNPYGFPWELVICAAVLGFVAVPFFLWRSFRSVRSRLYVGREKELAIALSGLIEEKCRLLEKFSLVQKEYEGYEVESSLEDASFEKEATEAQSLEANCEKLNRSNSELEHEILCLEKGIKEEKSKHSEQDEVMADISKKIQSLEDESKSLKSLLTEAKMTFKGFQMNEEKLEIGIQDASSENCQLQESQKQLLQEAEVWKEQVSELNKQKITFEDSKVHAEQVLNDKENHIETLTERLLKIKDQAAVLEEDITDDGNLELEMNSELKDGAYLDNPPKGALKKLIHAAKLNASLTTLEGERNQFIFSYLKLIKPRKSLESILKIFRRNKHLCSRKTHILKVRIRNFNRKLMTELYQENEMKLYRKLIVEENNRLEKEKLSKVDEMISHATEELETCRKRAKDLEEELERTILFYQGKIIYHEKKAHDNCLAAWTAERNLNDLRKENAHKRQKLAETEFKIKLLEKDPYALDVPNTAFGREHSSYGPSPLGRPSSETRAFLYLPTLLEGPLRLSPLLPGGGGRDPRGPGNPLDHQITKERGESSCDRFTDPHKAPSDTGPLSPPWEQDRRMMFPPPGQSYPDSALPPQRQDRFYSNSARRSGLAELRSFNIPSLDKMDGSMPSEMESSGNDTKDNLGNLNVADSSLPAGNEVSGPGFVPPPLASIRGPLFPVDTRGPFMRRGPPFPPPPPGTMFGASPDYFPPRDVPGPPRAPFAMRNVCPPRGFPPYLPPRPGFCPHPHPHILKIE

SEQ ID NO: 28354 - protein, 185 aa, Homo sapiens
LAVRIHSIGILQQNTNSLTTSSGQVHSSDLQGNYIQSPVSEETQTQNIQISPAQPVVHLQLQESRPPTSEVQIVQGITPQTIHSVQANGQNISQQASQNLQLQLNPGNFLIRAQTVTPSGQITWQMFQIQGVQSLQNLQIQKTAAQQLTLTPVQTLTLGQFVAGGAFTSTPVSLSTGQLSNLQLQ

SEQ ID NO: 28355 - protein, 133 aa, Homo sapiens
LRALLSLFSLNRVAANPKVREQVRLELSLVNSDLQMLKEELEGLNISVGIYQNTEEAFTVPLIPLGLKETKDIDFSVILKDFILEHYSEDGYLYEDEITDLMDPRQACRTPSRDEARVELLMTYFIQLGFVEN

SEQ ID NO: 28356 - protein, 115 aa, Homo sapiens
LPAVPRGLLPAPGLRGGHVSARSRGCHSIVIALPLGREPLPPTSPSSFIPGPNLPADPRSRPRSLSSAASRGPDPGRGHLSARSHPCHLSPLPSSTPGLGTRPLTAHCPRAQPPR

SEQ ID NO: 28357 - protein, 63 aa, Homo sapiens
LRRQRQRPRPGLRSGPEDRRWAGGEGLAQPAVVTRAPRLQAPAAGMDRRGGGRGGGGGGGRPG

SEQ ID NO: 28358 - protein, 431 aa, Homo sapiens
LGRNHINVMCVGKPSVRAQILFCIRESILGRNHIHVISVAKVSVRIQTLLNIEGSTLERNPINVMSVGKLLIRAQSLFYIRGFILERNPIPVINVAKPSVGFQILLIINEFTLERSLTHVISAIKCLVEDEILLNITEFIQVRNPMNVMNVGKPLVRAPTLFFIRESTLERNLMHVVIVLKALVAVQILLSIKEYTLERNHMHVISVIKVLVKAQTSLNIREYTLVKSLIIAIVVRKPSVRVLTLFFIREFTLEKNYYLCTQCSKSFSQISDLIKHQRIHTGEKPYKCSECRKAFSQCSALTLHQRIHTGKKPNPCDECGKSFSRRSDLINHQKIHTGEKPYKCDACGKAFSTCTDLIEHQKTHAEEKPYQCVQCSRSCSQLSELTIHEEVHCGEDSQNVMNVRKPLVCTPTLFSTRDTVPEKNLMNAVDY

SEQ ID NO: 28359 - protein, 164 aa, Homo sapiens
LPAPAGHCPGDTRGLYLDPTAAARAPEDRPLLSPSVCGPAAAQLFRAHTRCGASGHALGGRSQGRVQCGAHSRVLCAPPGPLPGQILHPGARPGGGSLPIPAQGHCAERGQRGAGAAGQSCSTAPGQPRTPCGLLPPRAGQARASGHQAPDHQWPDCEPGPWSL

SEQ ID NO: 28360 - protein, 45 aa, Homo sapiens
MFNNSAGSSCFVSAAFGFRSPLLQWPRWLHRSVWRAGTCTGRREP

SEQ ID NO: 28361 - protein, 32 aa, Homo sapiens
LPLAQLSFTGQIALPPHSPRPKLDLSAWELQL

SEQ ID NO: 28362 - protein, 94 aa, Homo sapiens [sequence omitted]

SEQ ID NO: 28363 - protein, 27 aa, Homo sapiens
LAIELFTFIQRRLGKHQICMWCVPRQT

SEQ ID NO: 28364 - protein, 22 aa, Homo sapiens
LSLVEDGCLKCRLLLAEYHLGA

SEQ ID NO: 28365 - protein, 27 aa, Homo sapiens
LGAQRPVHPREERLPQRQRFHSPKPRF

SEQ ID NO: 28366 - protein, 49 aa, Homo sapiens [sequence omitted]

SEQ ID NO: 28367 - protein, 19 aa, Homo sapiens
LTLLTGLVPRGLLDCCVKS

SEQ ID NO: 28368 - protein, 68 aa, Homo sapiens
MSRQSVSSLPSSQMLSLQQTCRIAQKPLCRWSGSCGGWLPTGNTNGLLKSMWPLPSATKRRASCSPPS

SEQ ID NO: 28369 - protein, 144 aa, Homo sapiens
LLLLIIWVRVTFMSCSTHREGLQLRYSLLKPARPRTHREEETTPDAPPLRAVTLTVKVCGITPEVRETTNPPEETPDASEHLKEQTLDTPSLRTETPRQFAASFLKAVRPRTHQFWTQKDLSRLRKWQAIYEEGRDSKRWSQVL

SEQ ID NO: 28370 - protein, 176 aa, Homo sapiens
VLWGAPHLGSSPLALAPRPSSPLSAPSPFSFSSLSSPLSLLSAAVSPAPSSGRREAVKGEGGLGVNFFLCGCGRSLWRASGETPAQQNHGWPDAGPWTPQKAAVAVAARPGEALPGRAGGRRGRRRRGWPDPGALTRLVVGLRQGRQWEAPVLRPVPAQTPAEEAERVHLGRRGHH

SEQ ID NO: 28371 - protein, 74 aa, Homo sapiens
VSTRQATQQPGTLISPRYGWCGRVHRPEGSTGLGLPAPNPCTTHSREYPMDSCGRGEARDEGDGPHLPTSLGRG

SEQ ID NO: 28372 - protein, 71 aa, Homo sapiens
LARVTRLTSTSPDPDAEARMWAQPCARRLAGIKGWAGWHGGSRCPCLGVAVYSCRPGATARTTPPFSYPDS

SEQ ID NO: 28373 - protein, 15 aa, Homo sapiens
LILCQAFLLFNTGRR

SEQ ID NO: 28374 - protein, 88 aa, Homo sapiens
LRNHTAAPFFSCSSSCLRRRSAHCSSLQSPALSCRIGQRSRRRPLHPAQVATASVRFSKPQHHLLSPSSLDRRSLSPDATARSDHRRF

SEQ ID NO: 28375 - protein, 113 aa, Homo sapiens
LTSSLYFYAGRMENTGSGNFKVTDDLAQIDYDFLGHGTRTPSLSELRKSPAPFWRATWGFEKRTDQKAAASRRLPPSPLCQDLDAWPKCPTHRRLAGSQPHTSAAFCFPGQGF

SEQ ID NO: 28376 - protein, 319 aa, Homo sapiens
LYGATKGGEWEPFEWRPLQQQAFCKLKEKLMSAPALGLPDLTKPFTLYVSEREKMAFGVLTQTVGPWPRPVAYLSKQLDGVSKGWPPCLKAMAATALLAQEADKLTLGQNLNIKASHVVVTLMNTKGHHWITNARLTKYQSLLCENPSITTELYNTLNPATLLPVSDSPVEHNCVEVLDSVYSSRPDLQDQSWASVDWDLYTDESSFINPRGERCAGYVVVTSDNVIEAKSLPQGTSVQKAELIALTQALELSEGKTINIYTYSRYDFLTLQVHGALYKEKALLNSGGKDIKYQQEILQLFEAVWKPQKVAVMHCRGHQ

SEQ ID NO: 28377 - protein, 13 aa, Homo sapiens
MRFHHIGQAVLNS

SEQ ID NO: 28378 - protein, 210 aa, Homo sapiens
LPAQLPHLLLVEVPQARLALALELLELGQQDLILLLQEAHLVDVVGEAVIQLLQLHLLVGAGVLELGVDGVGQREVHRVLQEPHPGHAAPQAHGRGARGIHAARGRGVEAAAGAGAQRAAQAVGAGGRSHVAPAGARPARGARAAEHPAVGGRGHGPGGHGCGGWRWPGRRRWRGLAPGEEANEGATAKLPLDDIDLLLSSILCIGCPTF

SEQ ID NO: 28379 - protein, 10 aa, Homo sapiens
LPKEIRRAAL

SEQ ID NO: 28380 - protein, 62 aa, Homo sapiens
LGEEGPSAAPRYSLALPSARTYTRWDPCPALPGDWLGLGPPCCGTGCFQGAQPFLMSTQFTI

SEQ ID NO: 28381 - protein, 13 aa, Homo sapiens
LAVSQEDRSCQAD

SEQ ID NO: 28382 - protein, 79 aa, Homo sapiens
LLSRFTSKMTVFRRGQVIFGVKWRESTGFFEGEEKKQCQHDCLGTADLMMCPQGYSLSFCVICTGENIPLSHANTPSKV

SEQ ID NO: 28383 - protein, 91 aa, Homo sapiens
LSAEQRPLPDGRLHTGQVPDEMPLNFDLCSGVVAEPGACAALPVEETLPEPAAPGTAEATRRPAVCQRVRVGGEMGCARPDALRDLLKVIS

SEQ ID NO: 28384 - protein, 52 aa, Homo sapiens
MSGPGDVLYETFFLRYINHTWKSLSVIHANPQRGRADQLTLLGSLTLLPFTG

SEQ ID NO: 28385 - protein, 88 aa, Homo sapiens
LEKVCDDLIRGAKEKNLKVKGPVRMPAKTLRITTRKTTCGEDSKTWDHFQMRIHKRLIDLHSPSEIVKQITSISIEPGVEVEVTIADA

SEQ ID NO: 28386 - protein, 30 aa, Homo sapiens
LFQLTTASERPMLSLDCLVPAARFHAWEGE

SEQ ID NO: 28387 - protein, 116 aa, Homo sapiens
LLTPSPVTVTVSTRWVRPRVAAGAGLRALWRGVKPWLCLPVGLPDARPPGAAAHGGRSLPTRLVLQDRSHPEEAPRRREEVPEGVWHGAPGPLVHSLPLEESLPAVPGLSPARSRT

SEQ ID NO: 28388 - protein, 27 aa, Homo sapiens
LQVDKALSGNGVHIQAGRSKRHWYQWL

SEQ ID NO: 28389 - protein, 172 aa, Homo sapiens
LDSADICSLLSTRFPGLPAAACRGACRQRARVRHFVDLHPNRSSARIPSPWIPVEPAGKLAPEGVELEFRWPTPSESCRLVLSTQQKFVASQFLVLRRGEERNLTLNTRSSQGAISFNFSSLLPFAMKRKQKRFLQMTLLFTVALIFLPNVGLWSLYKDKHLVKSAEPGEQQ

SEQ ID NO: 28390 - protein, 209 aa, Homo sapiens
LDSADICSLLSTRFPGLPAAACRGACRQRARVRHFVDLHPNRSSARIPSPWIPVEPAGKLAPEGVELEFRWPTPSESCRLVLSTQQKFVASQFLVLRRGEERNLTLNTRSSQGAISFNFSSLLPFAMKRKQKRFLQMTLLFTVALIFLPNVGLWSLYKDKHLVKSAEPGEQQEFNFGLKYILFCHSSEKKKMDTLDVKLFLFLFTSFNP

SEQ ID NO: 28391 - protein, 36 aa, Homo sapiens
LCGLRFLLVVTVGAVSAFLFRGGHLGQNTLPATLFL

SEQ ID NO: 28392 - protein, 50 aa, Homo sapiens
LDDHSSVLPERIRTWSLARGRQRPVWEASCYLWLSSCMSVLVFIKLDNRK

SEQ ID NO: 28393 - protein, 78 aa, Homo sapiens
LGDRRARAARSSWASAAHSGQPLLKTPFPSPFSAPSGRQSGSDQSLAQSPGCSAVARSQLTAAATSQVQAILLPQPPE

SEQ ID NO: 28394 - protein, 48 aa, Homo sapiens
LCPNLCAQLHRMWWGQREGQSHHWTQLIREEHIPQTAANPSPLASPPS

SEQ ID NO: 28395 - protein, 20 aa, Homo sapiens
LLCEKLIRKPSRKKLFVLQT

SEQ ID NO: 28396 - protein, 355 aa, Homo sapiens
LTFRDVAVEFSPEEWECLDSAQQRLYRDVMLENYRNLVSLGLAIFKPDLMTCLEQRKEPWNVKRQEAVAKHPSPCCFHFTAEVLPEHDIKDSFQKVILRKYGSSDLNTLHLKKDYQSVGNCKGQKSRYNGLHQCLSTTRSKTSQCNKCGKAFGLCSIFTEHKEIFSKEKCYKCEECGKDCRLFSDFTLQKRIHTAERCYKCEDCAKVFKKFSNLTEHNRVHPGEKPYKCEECGKTFTCSSTLIKHKRNHSGDRPGKCEECNKAYRWFSHLAKHKRIHTGEKSYKCNECGKAFTWISVLSHHKKIHTREKPYICEGCGKAFTRSSTLISHKRIHMEERPYKCEECNKAYKWFSNLA

SEQ ID NO: 28397 - protein, 34 aa, Homo sapiens
LRCSAVPVKQRLNVPGGGGSRWWPGVLAWRHLQQ

SEQ ID NO: 28398 - protein, 37 aa, Homo sapiens
MWKRRARGNCAVTIAPPPQKAPKRRLGAERGHPAFVC

SEQ ID NO: 28399 - protein, 26 aa, Homo sapiens
LNGVGVGGLEGREVKDSQAYLTTQSC

SEQ ID NO: 28400 - protein, 54 aa, Homo sapiens
LTAEVCGFTPEVSETTNPPEGRNSGHVLTSEGTNSGHTIFKNCNTHHEGPWLHS

SEQ ID NO: 28401 - protein, 218 aa, Homo sapiens
LCIAKTILSRKNKAGGITLPDFKLYYRATVTKTAWHCFKNRHIDQWNRIQNSEIRPHIYKHLIFDKSDKNKQLGKDSLFNKWCWKSCLAICRKLKWNPFLTCYIKINSRWFKDLSVNPKSTKTLEENLGNTIQEIGMGKNFMMKMSKANATKANIDKWDIIKLKSFCTAKETIIRANRQPAEWEKIFAIYPSDESLMSRIYKELKQIYKKKTNSPIKK

SEQ ID NO: 28402 - protein, 138 aa, Homo sapiens
LAEGPRPHLVRQGPGAMRGPEPRGGTGSRAGGGARGAAGRPWLQEREEAAHGPEQGGLRGGLQAGRRRPRGEGRGPAAGAGERKWLRGPRGDVPRGQGGRQTGAVCVHASPRRERRARDLGSLGQEEAAGGGSDGKQL

SEQ ID NO: 28403 - protein, 144 aa, Homo sapiens
LAEGPRPHLVRQGPGAMRGPEPRGGTGSRAGGGARGAAGRPWLQEREEAAHGPEQGGLRGGLQAGRRRPRGEGRGPAAGAGERKWLRGPRGDVPRGQGGRQTGAVCVHASPRRERRARDLGSLGQEEAAGGGSDGKQGSFSGHP

SEQ ID NO: 28404 - protein, 82 aa, Homo sapiens
VGRGRRMPGNRRDAVRKATGCRSWKGKVGGRATISPTPRVSAPRTPGPRKGIAVWTPRGVPLMRGRAGLGTARTRGDRREAT

SEQ ID NO: 28405 - protein, 12 aa, Homo sapiens
LTQEPVRFGEGS

SEQ ID NO: 28406 - protein, 319 aa, Homo sapiens
LNPQAPEFILGCTASKRTPDGITKEASYGSIDQYPGCALALDGSSNVEAEVLENDGVSGGLGQRERKKKKKQPPGYYSCLKDGGDDSISAEALVNGMPTQQNSVSAEDAEFMGDMPPSVTPRTFDSPQNSTDSVSDTVPDSPFPGALGRDTGTAGQQEGGPGVDFGQSCFPAGAGRHTLSRTAGAQPCVRTDTTENLGVANGQILESSGEGTATNGVELHTTESIDLDPAKPESPSPPADGTGSASGTLPVSQPRSWASLFHDSKPSSSWPVAYVETKYSPPAISPLVSEKQVEVKEGLVPVSGDPVARHWLLSRRCTT

SEQ ID NO: 28407 - protein, 121 aa, Homo sapiens
LRANPRRELESLILREFTDCPLPFLHRRPRLPRGNASARDYISRHASPAGPRVLTIAAGLLAGALALLWFVSAVSECQLLALLVALSLLLAFLEQVCQTSQRILRQNQENEQAFIAMAHLL

SEQ ID NO: 28408 - protein, 124 aa, Homo sapiens
VLPIKGSHVEFGMWKGGRSHPFLPCSSRRAGSGGQLDSILPHQSPAWGPWGCKDLSSGVPSFLTSSILWKSAVFAEDNGLKIHLCSYKRDDLVLFYDCTSFVLTFGPSPWFLTQGFLNPLEFSA

SEQ ID NO: 28409 - protein, 88 aa, Homo sapiens
MMKQHTPLFLSAQGKQIWGPLHLCVGKHRWYNPLLSRPTLHSQKLRPCSWCTQHGDHRIWFATERNLDADHFTSESMNCSHAFKSFSG

SEQ ID NO: 28410 - protein, 98 aa, Homo sapiens
LFLSAQGKQIWGPLHLCVGKHRWYNPLLSRPTLHSQKLRPCSWCTQHGDHRIWFATERNLDADHFTSESMNCSHAFKSFRMASTVPKTLLSWTLYFPA

SEQ ID NO: 28411 - protein, 274 aa, Homo sapiens [sequence omitted]

SEQ ID NO: 28412 - protein, 116 aa, Homo sapiens
MFGETSRYLDVKQHLKPAITIQSLINPDRYIVVVEYDLGVLDYLSDFICCLYGVPSTYGVVTVPFSVRKGINIFLDGYVPTENLRFQDASLVFKVAETANEEEVKMMCMYKYSGMN

SEQ ID NO: 28413 - protein, 55 aa, Homo sapiens
LSPVSMKLGGDRVSCQFLTATSHQWLHSVSLTQHMAQECLPSVSVSTAAIPRCWS

SEQ ID NO: 28414 - protein, 186 aa, Homo sapiens
LYQVEPHDGTSALRKRKRFQNFLSVSLEDTAGRQPCLDLEAGLPASRTCVHFQVDRSWQRIEELCGRVSCFWSQMSLWQSLRSPATTGPRRIDRTSKTLCKDSECTKLQLTALSRGRETGCMLSCWEEGQEEKCLQLQEHPLEMPPVFNQVQSNCFLTPPGKTVQLGTVTAPCRVFPADVILPKVC

SEQ ID NO: 28415 - protein, 252 aa, Homo sapiens
LASSSSFLPSLTNPPPPPPPPPPPPPRLSTATRPKGPSCDACWFPTFRSSSSPQPPAKRLGKGQVCKAEDTSPGEATKKLQHQQRLTSCGADEKRQLPFRGANVGSGWQRLRPAGSGQQGRGSRGRPRPPAPRGLPLHLSGGEDSAALRPCPRQVARLPPALRARCLQPPGATRAEAASAHGVMLPATTLRRIVTGRGERGERGREGSRHTQPPACQNARRRGHVPVESPRDLPRLHKAPQFGQEGRETATK

SEQ ID NO: 28416 - protein, 45 aa, Homo sapiens
LVKHSLMTMMDIYTYIHIIHNDICVRIYLRLYFVGWAKFSVTITS

SEQ ID NO: 28417 - protein, 26 aa, Homo sapiens
LNWGLVWPTGLTLTTIMGNAKVVWIW

SEQ ID NO: 28418 - protein, 17 aa, Homo sapiens
VPMFRLPQTETLSANTL

SEQ ID NO: 28419 - protein, 12 aa, Homo sapiens
LKLSTFCWCIFR

SEQ ID NO: 28420 - protein, 24 aa, Homo sapiens
LWQERQQSAIILRSREVSASPDFY

SEQ ID NO: 28421 - protein, 233 aa, Homo sapiens [sequence omitted]

SEQ ID NO: 28422 - protein, 92 aa, Homo sapiens [sequence omitted]

SEQ ID NO: 28423 - protein, 92 aa, Homo sapiens
LEVNKYGSCLGEKKNVLQPVSKLQTTECINETLYMDTRAFKTALPACRAFAVLQRFTGVIALKPRNNFTRYSPLVECKWKPEEKGTLDTVFI

SEQ ID NO: 28424 - protein, 155 aa, Homo sapiens
LGHPAANTKTGPRRIHTVRVWGGNKKYCALRLDVRNFSWGSECCAHKTTIIDVVYNASNNELVRPKTLVKNCIVLIDSTLYRQWYESHYAPPLGCKKGAKLTPEEEEILNKKRSKKIQKKYHERKKNAKISSLLGEQFQQGKLLACIASRPGQCG

SEQ ID NO: 28425 - protein, 20 aa, Homo sapiens
LHHSNCCTKVRIATYCPKQS

SEQ ID NO: 28426 - protein, 419 aa, Homo sapiens
MLRLELDIMKHQSQLREKKYLEEIESVEKKNDNLLKALQLNELTMDDDTAVLVIDNGSGMCKAGFAGDDAPQAVFPSIVGRPRHQGMMEGMHQKESYVGKEAQSKRGMLTLKYPMEHGIITNWDDMEKIWHHTFYNELRVAPEEHPILLTEAPLNPKANREKMTQIMFETFNTPAMYVAIQAVLSLYTSGRTTGIVMDSGDGFTHTVPIYEGNALPHATLRLDLAGRELTDYLMKILTERGYRFTTTAEQEIVRDIKEKLCYVALDSEQEMAMAASSSSVEKSYELPDGQVITIGNERFRCPEALFQPCFLGMESCGIHKTTFNSIVKSDVDIRKDLYTNTVLSGGTTMYPGIAHRMQKEITALAPSIMKIKIIAPPKRKYSVWVGGSILASLSTFQQMWISKQEYDESGPSIVHRKCF

SEQ ID NO: 28427 - protein, 24 aa, Homo sapiens
VSGTQGRSVPSLRFFFLLSKERGS

SEQ ID NO: 28428 - protein, 111 aa, Homo sapiens
LPRRGCAQRQEVSGLGRTGEAVAIGVLCPSAPARPCRSARAFPGACTRRAWVTCLGSWSLARWPWPAWGSPHPQSRSRVAASASSTTASRSTRAPRPSSMPVRSATDCGAT

SEQ ID NO: 28429 - protein, 55 aa, Homo sapiens
LKLAMEYERSPLERKGQTLCFHESEDLAEPVPQGYCIHSLSLKGCAHFKNVIVRL

SEQ ID NO: 28430 - protein, 86 aa, Homo sapiens
LIFFSYWSLRLWLLQGHHELGLLVSSFPCLVSFSQFSQKPCPGPCSSPSPQPLTPATSGRMGSSSHSPRSQSPPWMGLQPELSMRP

SEQ ID NO: 28431 - protein, 87 aa, Homo sapiens
LIFFSYCRSLRLWLLQGHHELGLLVSSFPCLVSFSQFSQKPCPGPCSSPSPQPLTPATSGRMGSSSHSPRSQSPPWMGLQPELSMRP

SEQ ID NO: 28432 - protein, 108 aa, Homo sapiens
LQAPARRVSGVRKDRALLADPVFRFQPPISERSRQRAGNRHGQSRGDRHRPGHHLLLRGGVPTRQGGDHRQRPGQPHHPQLRGLHGHRAAHRGCGQEPGGAEPAEHRV

SEQ ID NO: 28433 - protein, 18 aa, Homo sapiens
MPAYACPEFPAACVSLSP

SEQ ID NO: 28434 - protein, 20 aa, Homo sapiens
VEELTVTATPLQDAPARNSC

SEQ ID NO: 28435 - protein, 38 aa, Homo sapiens
VRRRLPWRVGRLTSPPGQFSSASPGLALQPRSRWRCAA

SEQ ID NO: 28436 - protein, 76 aa, Homo sapiens
MTVCLYLTVLLTNNLLGSKGQHLLSKAQEEFEVNGFAIVTINGCYIKFSVIFVCDSTVVWVNVHRHNWLNPKSLIS

SEQ ID NO: 28437 - protein, 14 aa, Homo sapiens
LGNSAASQGEYRYS

SEQ ID NO: 28438 - protein, 14 aa, Homo sapiens
VTRNIPNKQQSSRN

SEQ ID NO: 28439 - protein, 72 aa, Homo sapiens
VMHSPASGPLLPPLRVPWLPPVVLGNLGPSPASPASHSSSLVTLRELRARLVAGLLCFCPPLLWSLAGNSMI

SEQ ID NO: 28440 - protein, 136 aa, Homo sapiens [sequence omitted]

SEQ ID NO: 28441 - protein, 460 aa, Homo sapiens
LPAAPPWGRGGASHRGVPASGSGLRRERAGVKTRRLPAGGRGAQSRWEAAVAAVAPAHRGTQGLAQMARGHLGPAGEPHFQPRQLRFPKRQLPAGVWRAPGPGRPAQPEVPRPKPGAPGPAPPGPRPRPNQSWFRAAAAATGAAEPSRPRSERRLPPHHGQQREPQRLRVGLHRPAAHAAAQGDTGQVPGHQGPDAARPAPQVGGAGAGAGADAGLLAGARAGLALAAVLGLRLWWLREPLADAGHPRHLAQRGLRHGPCGTQPLAGRVRQPARGCALRRLLQEVPRGPPPLPGRRRAGRGRAHASGGLVLLHTRPQAALAGAAALLLLTTAALRPPQGRDPHGGAQHAGAAGGRPGHLCPLGAQARGLPAGQLLPGPGPAPHLGPLRGRALHVPQGPRDLLLLWASQLDHLQCGLPRGAPRLPQHPGLQPAAGAEDRARVLRPPAAAPLLGEGALGFCV

SEQ ID NO: 28442 - protein, 185 aa, Homo sapiens
LLLGPSRPASRAGFPLVSFLSPSGEDEAVFLPANLLGTFPLFPSSAWDPFPSPQPVAVLCSRAPAWSLAAQGSLRRCTIQSFPVCLQLCNNRCNSRRFFPLQKETQDSPPRLAPTRLLSGHWVSLCWTLSVSGPPRHGWDVLAVCPALFSRPSGAWWGCTPLPGRTPFPWVCTPRRLFIRLPTGT

SEQ ID NO: 28443 - protein, 77 aa, Homo sapiens
VCRALGTALESQDRDGSRAETLQKHEALNHLLLSYSGLTAASRTSRCSADARTHPVVTRWSPKQPSRCKACAVALRP

SEQ ID NO: 28444 - protein, 65 aa, Homo sapiens
LGWGSRKETLQKHEALNHLLLSYSGLTAASRTSRCSADARTHPVVTRWSPKQPSRCKACAVALRP

SEQ ID NO: 28445 - protein, 22 aa, Homo sapiens
LILTILTNNNVPHEIKIRKELE

SEQ ID NO: 28446 - protein, 202 aa, Homo sapiens [sequence omitted]

SEQ ID NO: 28447 - protein, 129 aa, Homo sapiens
LGRLLSLPTLPGPNWISAPGSSNFSKCEILSSVLEFSSAQTISATDRICENTSMSRLGIILRHHLASPASHFKWVTRMELRCCLQEKLTTGFYFSNLIGGYAGTVSRLSIFNPVSKNFFTTITFRFLPL

SEQ ID NO: 28448 - protein, 120 aa, Homo sapiens
LGRLLSLPTLPGPNWISAPGSSNFSKCEILSSVLEFSSAQTISATDRICENTSMSRLGIILRHHLASPASHFKMIANDSTSSITDWLIPLYFHAVPGGQCDNWSARRTRNFEWILGYSRL

SEQ ID NO: 28449 - protein, 114 aa, Homo sapiens
LGRLLSLPTLPGPNWISAPGSSNFSKCEILSSVLEFSSAQTISATDRICENTSMSRLGIILRHHLASPASHFKWVTRMELRCCLQEKLTTGFYFSNLIGGYAENRRLDGSSGSS

SEQ ID NO: 28450 - protein, 50 aa, Homo sapiens
LSSVLEFSSAQTISATDRICENTSMSRLGIILRHHLASPASHFKLLPLVN

SEQ ID NO: 28451 - protein, 166 aa, Homo sapiens
LLPEPAEGHLQQQPDTKAVLNRKVLRTGTLYIAESHLSWLDSSGLGFSLEYPTISLLALSRDQSDCLGEHLYATVNDKFEESKESVADEEEEDSDDVELITEFIFVPSDKSALGAMFTAMCECQALHPDPEDEDEDDYDGEEYDVEAHERGKGDIPKSYTYEGLSH

SEQ ID NO: 28452 - protein, 340 aa, Homo sapiens
MDTKQLIGDAAKHQVAMNPTNTVFDAKRLIGRRFDDAVVQSDMKHWPFMVVNDADRPQVQVEYKGETKSFYPEEVSSIVLTKMKEIAEAYLGKTVTSAVVTVPAYFNDSQFQVTKDAGTIAGLNVLRIINEPTVAAIVYKSSDKKVGAQRNVLIFDLGGGTFGVSILTIEDGIFEVKSTARDNHLGGEDFDNRMVNHFIAELKRKHKKDISESKRAVRCLRTACEHAKRTLSSSTQVSIEIDSLYVGIDFYTSITCAQFEELNADLFCGTLDPVEKALRDAKPDKSQIHDIVLVGGSISIPKIQKLLQDFFNGKELNKSISHDEAVAYGCPGSHPVWRQV

SEQ ID NO: 28453 - protein, 152 aa, Homo sapiens
MAVQAAILSGDKSENVQDLLLLDVTPLSLGIETASGVMTILINCNTTIPTKQTQTFITYSDNQPGVLIQVYEGERAMSKDNNLLGKFEFTGIPPEPQGVPQIEVTFDIDANGILSVSAVDKSTGKENKITITNNKGHLSKEDIERMVQEAEN

SEQ ID NO: 28454 - protein, 274 aa, Homo sapiens
VAVTDSQADFFFENEAIKELMTEEHIATEITAKFTALYSLSQYHQQTEIFILFFSDVLEKKHMIENSYLSDNTRESTHQSEDVFLPSPRDFFPYNNYPDSDDDTEALPPYSPTGDDVQLLPTPSDHSRYRLDLQGNEYSIHSTPNCRDHERNHKVPPPIKPKLVVPKTNVKKMDPNILKTIEAGIGKNPRKRTSQVPLAHPEDMNPSDNYAEPIDTIFKQKGYSDEIYIVPDDSQNHIKIQNSLVNNTQGDEENGFSDRTSKKSRGMEAFKIQI

SEQ ID NO: 28455 - protein, 16 aa, Homo sapiens
VEPCTGMTHARHISGY

SEQ ID NO: 28456 - protein, 118 aa, Homo sapiens [sequence omitted]

SEQ ID NO: 28457 - protein, 246 aa, Homo sapiens
LKRGLLSPQTLLEDPLRLSPVLPAGGGRSPSGRENPLDHQITNERGEPSCDRLTDPHRAPSDTGSLSSPWEQDHRMMFPPPGQSYPDSALPPQREDRFYSNSDRLPGPSELRSFNMPSLDKMDGSMPSEMESTRHDAKDDPGSLNVPDSSLPAENEATGPGFIPPPLAPISGPLFPVDTRCPFMRRGPLFPQPPPGTMFGASQGYFPPRDFPGPPHVPFAMRNICPLRGLPPYFHPRPGFYPNPTF

SEQ ID NO: 28458 - protein, 71 aa, Homo sapiens
LGGARRQRESHSGLPIPEDKGEESSSSSHRPVFQSSFGFLSRPALRRRWLWGWRAGPVPELAAGSTAMRQH

SEQ ID NO: 28459 - protein, 269 aa, Homo sapiens
MVPMCSPPPPTLATTLAHLPTGSRRINDRPEVRMAIPGPRPGVSVPTSFWPGRSVIPVSWTLLGSSLLCSSGPGAAGWEGAAKKPELAAYPEIRGPPTPKSRVQLELAPPCSEAGRSLGDWCLCTDGGLWGSFLPALTSLFVPGLGLGQPWGIRRGHLGPAVYSEGGQPPPLHSASTKSAPESSRLLLFICAGPGRVKGQRDGHKEPAGGRSEDVLSRETSRESLAGLPQPRAPPGLRVPRPELGRCSESHCRPVCHAEVQLATRVPGT

SEQ ID NO: 28460 - protein, 124 aa, Homo sapiens
LLWAKPVVYRRKSMPEELMVLNIDHHRNSRNLSTVDDDIAFLWSRLAEQGYKGGNCLAAPTENKQTKNSYLKLLERVHGELVIQTQSKFANDIFHKKSPKSMAQPPPPHRRGIGDRWHVCLDRS

SEQ ID NO: 28461 - protein, 58 aa, Homo sapiens
LTDAHRHGVAAAAPLGARASDGSRDLSERRGQRSRSRRDMVADLISSEHLIVSPSLGI

SEQ ID NO: 28462 - protein, 101 aa, Homo sapiens
LVTVMKMEKTPQETYANIGGLDNQIQEIKEAVEFPLTHPEYYEEMGKKPPKGVILYGPPGTGKTLLSKAVANQTSATFLRVVGSELIQKYLGDGPKLVFIW

SEQ ID NO: 28463 - protein, 25 aa, Homo sapiens
LRLRLWKTTKLKRRTQMEVWEPGMR

SEQ ID NO: 28464 - protein, 244 aa, Homo sapiens [sequence omitted]

SEQ ID NO: 28465 - protein, 84 aa, Homo sapiens
LVTWDATLYLAEWAIENPAAFTHRTVLELGSGAGLTALAICKMCRPRAYIFSDCHSRVLKQLRGNVLLNGLSLEADITANLAPE

SEQ ID NO: 28466 - protein, 16 aa, Homo sapiens
VLVGSDHLPYRWKMDA

SEQ ID NO: 28467 - protein, 177 aa, Homo sapiens
LEPRDEKIKMPLLRGLLWLQVLCAGPLHTEAVVLLVPSDDGRAFLLRSRLLHPEAHVPPAADRGASLQCVLHQAAPKSRPRSPAAGAALLHRPRRTGDEPCREFHGNGFPGPTQLTPGECGLPAPSSLLQHASAPVRTGSEGQVVGCPRARGETGEGLSLAFLSSLMFTSRNGLVGC

SEQ ID NO: 28468 - protein, 205 aa, Homo sapiens
LGLQDLSAPHCWKAVSYVHRSQKALLVFRRTLSNLLYMPLLRGLLWLQVLCAGPLHTEAVVLLVPSDDGRAFLLRSRLLHPEAHVPPAADRGASLQCVLHQAAPKSRPRSPAAGAALLHRPRRTGDEPCREFHGNGFPGPTQLTPGECGLPAPSSLLQHASAPVRTGSEGQVVGCPRARGETGEGLSLAFLSSLMFTSRNGLVGC

SEQ ID NO: 28469 - protein, 192 aa, Homo sapiens
VQPLVHRSQKALLVFRRTLSNLLYMPLLRGLLWLQVLCAGPLHTEAVVLLVPSDDGRAFLLRSRLLHPEAHVPPAADRGASLQCVLHQAAPKSRPRSPAAGAALLHRPRRTGDEPCREFHGNGFPGPTQLTPGECGLPAPSSLLQHASAPVRTGSEGQVVGCPRARGETGEGLSLAFLSSLMFTSRNGLVGC

SEQ ID NO: 28470 - protein, 260 aa, Homo sapiens
LRGAPRLPPAPSRAPQRSAGRLPAAVCPPAPRGGRVAKRACDPASGRAGEDARSHEAPACEGGGAAARAALGVHRSQKALLVFRRTLSNLLYMPLLRGLLWLQVLCAGPLHTEAVVLLVPSDDGRAFLLRSRLLHPEAHVPPAADRGASLQCVLHQAAPKSRPRSPAAGAALLHRPRRTGDEPCREFHGNGFPGPTQLTPGECGLPAPSSLLQHASAPVRTGSEGQVVGCPRARGETGEGLSLAFLSSLMFTSRNGLVGC

SEQ ID NO: 28471 - protein, 229 aa, Homo sapiens
LVGIHKLFLFNFYHFLRRFLQPHQREVTKNLLFAAQASHHLVHPAIIQSLLMTVANNFVNDKNSGEAMTIGINAVKETTAQCPLAMTEKLLQDLAQYKTHKDNNVMMSARTLIRLFRTLNPQMLQKKFWGKPTEASIEARVQEYGELDAKGYIPGAEVLEVEKEESAENDEDGWESTSLSEEEDADGEWVDVQHSSNEEQQEISKKLNTMPMEEQKAKTAAVSTSRVLS

SEQ ID NO: 28472 - protein, 68 aa, Homo sapiens
LAAAFQGSRATRWGCWLREHGLLASAEVAAVEEPHFQKKTNMSAAAGSGLASIYLPDPDLCSAELPTL

SEQ ID NO: 28473 - protein, 123 aa, Homo sapiens
VMWKWPEMLSSQGLSLLPRLECSGTITTHRSLDLLDASDHSFISMPSEGLDTEDSNSLSLRWEKTFLKSKKIHDGQNLHTASILFIYIFKKILGHTLQNLSQKRNYSLDKQRVNCIHLFLDYG

SEQ ID NO: 28474 - protein, 117 aa, Homo sapiens
VMWKWPEMLSSQGLSLLPRLECSGTITTHRSLDLLDASDHSFISMPSEGLDTEDSNSLSLRWEKTFLKSKKIHDGQNLHTASILFIYIFKKILGHTLQNLSQKRNYSLDKQRVNIHS

SEQ ID NO: 28475 - protein, 53 aa, Homo sapiens
VPPVLPRPQKVCLMKGVANSLGDFKQTLKVPSGSFLLLTLKCKRRQRSERKDC

SEQ ID NO: 28476 - protein, 148 aa, Homo sapiens
LGSVRWEEAPPVAPQVDRSWQRIEELCGRVSCFWSQMSLWQSLRSPATTGPRRIDRTSKTLCKDSECTKLQLTALSRGRETGCMLSCWEEGQEEKCLQLQEHPLEMPPVFNQVQSNCFLTPPGKTVQLGTVTAPCRVFPADVILPKVC

SEQ ID NO: 28477 - protein, 148 aa, Homo sapiens
MESNSPAHESRSRSEVDRSWQRIEELCGRVSCFWSQMSLWQSLRSPATTGPRRIDRTSKTLCKDSECTKLQLTALSRGRETGCMLSCWEEGQEEKCLQLQEHPLEMPPVFNQVQSNCFLTPPGKTVQLGTVTAPCRVFPADVILPKVC

SEQ ID NO: 28478 - protein, 139 aa, Homo sapiens
LNAHGKVDRSWQRIEELCGRVSCFWSQMSLWQSLRSPATTGPRRIDRTSKTLCKDSECTKLQLTALSRGRETGCMLSCWEEGQEEKCLQLQEHPLEMPPVFNQVQSNCFLTPPGKTVQLGTVTAPCRVFPADVILPKVC

SEQ ID NO: 28479 - protein, 234 aa, Homo sapiens
LLILFKDDYFAKKIILIKKKKEEERKQNKVEAKLRAKQEQEANQKLEEDAEMKSLEEKIGCLLKFSGDLDDQTCREDLHILFSSHGEIKWIDFIRGAKEGIILFKEKDKEALGKAKDVNNGNLQLQSKEVTWEVLEGEVEREALKKITEDQQESLNIWKSKGHRFKGKGKGNKAAHPRSGKEKVQFQGKKMKFANDDEHDENGATGPMKRSGEETDKEEPVSKQQKRENGAGDE

SEQ ID NO: 28480 - protein, 146 aa, Homo sapiens
LGDPWVTWEAVEEIEEASLQEDPRVPEGTPLEEETSSTKLETGSVPIRVVETRTSPGEQRATSVRLQSLKASSRHPSHPRVVIMAEVALVACGEEEVASWIMVVPVECSEVAVVETEVASVVAGHGPRWLWWRKTRWPWGAPGPLM

SEQ ID NO: 28481 - protein, 138 aa, Homo sapiens [sequence omitted]

SEQ ID NO: 28482 - protein, 29 aa, Homo sapiens
MSYWAPVCRIYAHVGTEESSVVAPTRAYW

SEQ ID NO: 28483 - protein, 109 aa, Homo sapiens
MRPSEGCLIAPALLTTLSQPLPSPHPQGLTAPHPLQAGTQLGISPAVTDFVQAKDLAGPDAVPSPRPGMGVGVPELMWCPLSLSEWLRLIPLTYLQSPSTQGRPDVATG

SEQ ID NO: 28484 - protein, 38 aa, Homo sapiens
LKSTAQCSFGSYSVISGELQKSLSRPNVEVKFSNNVTS

SEQ ID NO: 28485 - protein, 193 aa, Homo sapiens
MLSHKTQHKSIYTREKSYKCKKCGKTFNWSSILTNNKKIHTEQKPYKCEECGKAFKQHSTLTTHKIICAEEKLYRCEECGKAFCQPSTLTRYKRMHRRKKLYKCEECGKAFTQFSTLTKHKRIHTRGKHYKCEESGKAFIWSSGLTEHRRVHTRQKPYKCEECGKALIQFSTLTRHKRIHTGEKPNKSMWQTF

SEQ ID NO: 28486 - protein, 145 aa, Homo sapiens [sequence omitted]

SEQ ID NO: 28487 - protein, 112 aa, Homo sapiens
LNGKLTGMALRVPTANVSVVDLTYHLEKPAKYDDIKKVVKQASEGPLKGILGYTGHQVVSSDFNSDTHSSTFNAGAGTALNDHFVKLISWYDNEFGYNNRVVDLMAHMASKE

SEQ ID NO: 28488 - protein, 171 aa, Homo sapiens
LAKGYTGLRTKKHIPCSQHKSLTGTACYMSINMHLGKEQSHCNNLEVLGHMFMYFLCSSLPWQGLKADTIMSGTEDRGHIARHAHRSALRELPRGDGYVPALRAAPGLRSSTTTTCGSSPATSSTEAASCSTLSTRGSGSPWRPPSAVSTPTCPPSLSFGTKISRTAKTRR

SEQ ID NO: 28489 - protein, 72 aa, Homo sapiens
VHQEQPHMVWADIKSCQIQQEDGQSFLSCSPYKKTNRTAKNSNFSSHGEPWKEPESLMELDSAWRWFSRTRC

SEQ ID NO: 28490 - protein, 40 aa, Homo sapiens
VGSGAYRMTDLVYRDPGVLKQMKTLKMTEGDFSGDRGLPG

SEQ ID NO: 28491 - protein, 292 aa, Homo sapiens
LLSAARAKEEDMGTVVAIHLGTTYPCVGVFKNGRMEIIANDQGNRIMPSYVAFTPEGECLIGDAAKNQLTSNPKNTVFDAKRLIGRRWHDPSVQQDIEFLPFKVVEKNTKSYIQIDVGGGQTKTFAPKEISAMVLTKMKENAEAYLGKVTHAVVTAPAYFNDAQCQATKDAGTIADLNVMRIINKPTAAAIAYGLDKREGEKNILVFDLGGGTFDVSLLTIDNGVFKVVATNGDTYLGGEDFDQRVMEHFIKLYKKKTGKDVRKDNRAVQKLWRKVEKAKRALSSQHQASSN

SEQ ID NO: 28492 - protein, 42 aa, Homo sapiens
MILFLLLETYCPARWCVMRTALRVMPLSTSRPKRLPTRPSRR

SEQ ID NO: 28493 - protein, 52 aa, Homo sapiens
LNGADCIMLSGETAKADYLEAGRMQHLIAHEAEATIYHLQLFEELPPTGAHY

SEQ ID NO: 28494 - protein, 362 aa, Homo sapiens [sequence omitted]

SEQ ID NO: 28495 - protein, 731 aa, Homo sapiens [sequence omitted]

SEQ ID NO: 28496 - protein, 22 aa, Homo sapiens
VLGTTLTNALFSRWQCSFWTFL

SEQ ID NO: 28497 - protein, 27 aa, Homo sapiens
VMPNPVLCTQVTLWLCPLLMPALQQLS

SEQ ID NO: 28498 - protein, 138 aa, Homo sapiens
LKRELLKGIFEMGWEKPPPVQEESIPIALSGRHILARAKHGTGKSRTYLIPLLERRDLKKHNIQAVVLVPTRELALQVSQICVQVRKHMGGAKVMATTGGTNLRDDIIRLDDTMHVVIATPRRILDVTKKRQRLIMSR

SEQ ID NO: 28499 - protein, 35 aa, Homo sapiens
LSHWMKKRGLHTSQPVTAVSTGRRNAVRSMKRKAS

SEQ ID NO: 28500 - protein, 151 aa, Homo sapiens
LGLRGRRRRGPTPLGRPAARRRATFPHCRRRDRRLRSPLRTAPRPGRSSGLGGRTRTKRKRRRRPGVVEALRAGGRREPFSPSPEAGLRSRMGWRARGSDPHESERPSHSHHRRLAPEREARSQIFSQGTTIRRGAGGLLPRTVLHQGPEP

SEQ ID NO: 28501 - protein, 466 aa, Homo sapiens
LKCLRKEFCLPRILPISKRRAQKREKWLLCASRPDPRTAFLLSTENEGNLHFQCPSDVETRPQSKDSTSVQDFSKAESCKVAIIDRLTRNSVYDSNLEAALECENWLEKQQGNQERHLREMFTHMNSLSEETDHEHDVYWKSFNQKSVLITEDRVPKGSYAFHTLEKSLKQKSNLMKKQRTYKEKKPHKCNDCGELFTCHSVHIQHQRVHTGEKPYTCNECGKSFSHRANLTKHQRTHTRILFECRECKKTFTESSSLATHQRIHVGERPYECNECGKGFNRSTHLVQHQLIHTGVRPYECNECDKAFIHSSALIKHQRTHTGEKPYKCQECGKAFSHCSSLTKHQRVHTGEKPYECSECGKTFSQSTHLVQHQRIHTGEKPYECSECGKTFSQSSNFAKHQRIHIGKKPYKCSECGKAFIHSSALIQHQRTHTGEKPFRCNECGKSFKCSSSLIRHQRVHTEEQP

SEQ ID NO: 28502 - protein, 64 aa, Homo sapiens
LGWGAELELDHACVTKPPEKSLKDRTWRAAGLANTSMCREDGAPQLHKDPSRPHPVYLFIWLFI

SEQ ID NO: 28503 - protein, 67 aa, Homo sapiens
LGWGAELELDHACVTKPPEKSLKDRTWRAAGLANTSMCREDGAPQLHKDPSRPHPVYLFIWLFICIL

SEQ ID NO: 28504 - protein, 300 aa, Homo sapiens
LPCPALPCPAQDPLPASPRAQHLQSPLQKVGHRAAHLRVRSTQELLGTVPEWSGLLCHLPTVYYEGLQDKLAQIRDARGALSALREEHREKLRRAAEEAERQRQIQLAQKLEIMRQKKQVQWLPSHRPGPAGGPRSITSMFLPHRSTWRCRGSWPSSACRSRRRSGRCGWSSRSRRSRCARRCPPSPCPTPRHVPSSRHPEACGLRTNSHRCLFCPQLQAMPAAGGVLYQPSGPASFPSTFSPAGSVEGSPMHGVYMSQPAPAAGPYPSMPSTAAGKDGSGQRPCLLSLVFILAEFTEKQ

SEQ ID NO: 28505 - protein, 150 aa, Homo sapiens
VSPPREARLLARPPGVAEPPPSRSVWTPARPASVNGTFFSSSGCYLGGSGLGRGRVLRLVEDSPLGQGWVGERGLFGLHDSPTLITGQGLRLAFCYALPESSSEPLPRLPSTTPLSWQAQAGVRSQHVLSRGCGGRDGAGLGGGRVSRLR

SEQ ID NO: 28506 - protein, 86 aa, Homo sapiens
VTEGPGAPGREEIGQAGLPIAFLKILETLSFIELRHCPPLISSKTPVTRLKPCLVFRRSMGPRLKEPAPLLRATVTTLRENTAPIS

SEQ ID NO: 28507 - protein, 16 aa, Homo sapiens
LGSPRGIQQRGEEREM

SEQ ID NO: 28508 - protein, 224 aa, Homo sapiens
LGKAAGPGGTGQAECQVVVATHRANLKPWDGRAAPLGKRTEEGRLSTSSCASVSRNKPDSVPQGDPVWPPESTGPALCAGEETEPQSSEGLAWGPWAQPWAPSLCPSQTGTASTASPQRASRLALQGPPGTILSLSSSSPCLPPSHCDPGAASSWAGLQSLKLLLQVSFQGAADGCSLRDANTNRKGPMHGSDFPPRLCLHSMSLWGSWGSRPPSPAHSREVAS

SEQ ID NO: 28509 - protein, 128 aa, Homo sapiens
VAVFCQVYLLSCSWLRFADLCIHCGLLGTSNWKFFTPAMAGRNFGPQLRLPDSGRYSQSQLPSELGEREKGKYKKTQPCGLTPYSMIQAHSQLCVSRVIMVKRMVTSKDNHRASLLTLVRTRFLSLVL

SEQ ID NO: 28510 - protein, 223 aa, Homo sapiens
LKVNPNIHAVCTQEKEQIKTFNNKFASFVDKVRFLEQQNKMLETKWSLLQQQKTAGSNMDNIFESYINSLRRQLETLGQEKLKLEAELGNTQGLVEDFKNNYEDEINKSTETENEFVLIKKDVDEAYINEVELESCLEGLTISTSSGSCMKRRSGSCSPRSRTRLWCCPLTTAAPWTRTASSLRSRYSTRRSPTAVGLRPRACIRSSMRSCRRWLGRPASYKD

SEQ ID NO: 28511 - protein, 45 aa, Homo sapiens
VERQPTLVSTVTPVPMLTCVSSPVIFLVPERWGWMSPSLSQLYVH

SEQ ID NO: 28512 - protein, 71 aa, Homo sapiens
MLVMAPRTVLLLLSAALALTETWAGECGSGGKWPLPGGARGPQAGAQDLRSRAGRRVGRVSAPPHPQAPTP

SEQ ID NO: 28513 - protein, 190 aa, Homo sapiens [sequence omitted]

SEQ ID NO: 28514 - protein, 155 aa, Homo sapiens
VTEGGGHLPASSAPACHVPPLPCCWSCGSSRGKAKGSHLPLPLCTTPSPHPYPWLYCSGCSWTEGTLGYGHRVTVTKMAQRGTAAAWPLLPKPAWSMQGAPGGGEVSHGAPSFIYGHGRPIWEPSYSFPFLFGPQMSLDAQRSWGGALFWGSGSQ

SEQ ID NO: 28515 - protein, 131 aa, Homo sapiens
LNPGSADLLEPECSARRVVDELKLPSRGSFSTLPRGIREARQSLRLAIDWVSGAFFFSPLSFFSSVLLHARKLQSAARPPWVRDIQPRSLPCIVQPKDERPKGRKLKKSPTCAGSVHGLGKGIQRRWERRV

SEQ ID NO: 28516 - protein, 51 aa, Homo sapiens
VWRPSTWARGPGGLGAAGTRRGDDELRAKMCPGTPGTFQWISLRKGCWRSL

SEQ ID NO: 28517 - protein, 97 aa, Homo sapiens
MTAGGTELTTSLTGFPEGVKISRDGGAGTAGLRGRPWRDQEECRGVMTVRHPERSDWQTRTGRPCSCMIRELACGGSGRNCKAKGSGTDPENREEAE

SEQ ID NO: 28518 - protein, 19 aa, Homo sapiens
MLGIGSGDEMALVDTGAER

SEQ ID NO: 28519 - protein, 94 aa, Homo sapiens
VPARPSGQTSIYQGRAARLPIRARLSGPAANPRGAAGWRPPRPGVGDVLQTHRPCSQQHPWLQHPWAGHPGPYRKRPVAVGLSARSRRSFQTAV

SEQ ID NO: 28520 - protein, 74 aa, Homo sapiens
VPARPSGQTSIYQGRAARLPIRARLSGPAANPRGAAGWRPPRPGVGDVLQTHRPCSQQHPWLQHPWAGHPGPYR

SEQ ID NO: 28521 - protein, 89 aa, Homo sapiens
LLQLPALTHTRGEKKRGARERKKGGKIRISLQEPQTVCRRLSAWKVGGFRPGPPRNSPRRRLPHIWVWRVQSRCGSSCCSCCWIRNMSI

SEQ ID NO: 28522 - protein, 75 aa, Homo sapiens
LLSHTPEGKKKEEREKEKKGEKSGSHYKSHRPSADACQHGKSGAFARVLLEIPPEEDSPTSGRPVWCCEMLQNMT

SEQ ID NO: 28523 - protein, 195 aa, Homo sapiens
LAGHALGASACSGGEGFISAWPMTALKDRRERLWLWLESEAGAGGQGLSLGGDERGPEPCLPEGRARGHSPWRGWDPGSRGSVTAAWATACGDLTFLGKPMGQRSREIQAPSGRYGRTGAFAVEKLGVSVGKERNGSRGSSGAPGNAAYTLPRPPPSVHCAAWVLGQPEGRRLPCKARWGPACLGLNLDFMGLWL

SEQ ID NO: 28524 - protein, 114 aa, Homo sapiens
MDRGGPGGCGGHCQCSGPRILSPVVPVPQVCPSSEEAGEGSCQWAWCERDQPGRLLPAACRRPARPGGPHPPPAEARGQRRCQERRPSRPAPPGLPAGPLSGGEVSVRFECKTQ

SEQ ID NO: 28525 - protein, 301 aa, Homo sapiens
MLLPTALFSAHTGSPGSLCLRDAAAAAAAAPAVGRALAQDARFRLEMPESVTVQEGLCIFVHCSVFYLEYGWKDSTPAYGHWFREGVSVDQETPVATNNSTQKVQKETQGRFHLLGDPSRNNCSLSIRDARRRDNGSYFFWVARGRTKFSYKYSPLSVYVTALTHRPDILIPEFLKSGHPSNLTCSVPWVCEQGTPPIFSWMSAAPTSLGPRTLHSSVLTIIPRPQDHGTNLICQVTFPGAGVTTERTIQLSVSWKSGTVEEVVVLAVGVVAVKILLLCLCLIILRSLSLHSMSVSTRRRR

SEQ ID NO: 28526 - protein, 307 aa, Homo sapiens
MLLPTALFSAHTGSPGSLCLRDAAAAAAAAPAVGRALAQDARFRLEMPESVTVQEGLCIFVHCSVFYLEYGWKDSTPAYGHWFREGVSVDQETPVATNNSTQKVQKETQGRFHLLGDPSRNNCSLSIRDARRRDNGSYFFWVARGRTKFSYKYSPLSVYVTALTHRPDILIPEFLKSGHPSNLTCSVPWVCEQGTPPIFSWMSAAPTSLGPRTLHSSVLTIIPRPQDHGTNLICQVTFPGAGVTTERTIQLSVSWKSGTVEEVVVLAVGVVAVKILLLCLCLIILSFHKKKAVRAVEVEENVYAVMG

SEQ ID NO: 28527 - protein, 43 aa, Homo sapiens
LLSHNGEEDGDIQGQPQGLSPDTGENQIPFPGSVAPSRVLEAD

SEQ ID NO: 28528 - protein, 119 aa, Homo sapiens
LELPGPCARRCPRCRGATRESDKHPPPESCGAVRPSEDEDRMQVYRSTCRTHQKPPRLSADLKRAFGGGPGSAQLTSLGTARPSVGAGAGPLQPEGCSRRSPGGPGHRALALAESTGLS

SEQ ID NO: 28529 - protein, 396 aa, Homo sapiens
VCARARAHGSVWGNRKFCRLGEQYGKSEPRRQRWRAGEAARGRSGGRVSRGAGTPRGTPGCGGAGLDARAGGRGWPWMGPAGPRISRGPCGQHCLLEPGMGEWRGPCCPRGLGTLPLPTPTRAAAGRSSLRSSGPSVTLSRDAVIHGGGGGGRGRDKHGSGEVLNSVLLSCLSLGTFSPLGSVLDFAGCENLLTSESSVEPRLGLWSAYFLQSDCSCLRWSLSVPLWGTSALISALTAAVRAAGKWGAPSGGRVAVSLLISSVTFKLSLEATAAAGHVRRALGCWGKISSAGSRDRAGGRRGTAPRPRLGTWEGRAGALGPGARPSWDTREDGGGEEVGSAAGELGIMQMGKENLRPRPSAKSSLGICRACDGRQWQIWLDLLKMHLGSRASTKVR

SEQ ID NO: 28530 - protein, 381 aa, Homo sapiens
VCARARAHGSVWGNRKFCRLGEQYGKSEPRRQRWRAGEAARGRSGGRVSRGAGTPRGTPGCGGAGLDARAGGRGWPWMGPAGPRISRGPCGQHCLLEPGMGEWRGPCCPRGLGTLPLPTPTRAAAGRSSLRSSGPSVTLSRDAVIHGGGGGGRGRDKHGSGEVLNSVLLSCLSLGTFSPLGSVLDFAGCENLLTSESSVEPRLGLWSAYFLQSDCSCLRWSLSVPLWGTSALISALTAAVRAAGKWGAPSGGRVAVSLLISSVTFKLSLEATAAAGHVRRALGCWGKISSAGSRDRAGGRRGTAPRPRLGTWEGRAGALGPGARPSWDTREDGGGEEVGSAAGELGIMQMGKENLRPRPSAKSSLGIWHVMEGSGKYGLIF

SEQ ID NO: 28531 - protein, 412 aa, Homo sapiens
VCVCARARAHGSVWGNRKFCRLGEQYGKSEPRRQRWRAGEAARGRSGGRVSRGAGTPRGTPGCGGAGLDARAGGRGWPWMGPAGPRISRGPCGQHCLLEPGMGEWRGPCCPRGLGTLPLPTPTRAAAGRSSLRSSGPSVTLSRDAVIHGGGGGGRGRDKHGSGEVLNSVLLSCLSLGTFSPLGSVLDFAGCENLLTSESSVEPRLGLWSAYFLQSDCSCLRWSLSVPLWGTSALISALTAAVRAAGKWGAPSGGRVAVSLLISSVTFKLSLEATAAAGHVRRALGCWGKISSAGSRDRAGGRRGTAPRPRLGTWEGRAGALGPGARPSWDTREDGGGEEVGSAAGELGIMQMGKENLRPRPSAKSSLGICRYCGKLSVHLAGLVSVNQNLKRASRSLFPQWVKVIIACGLKA

SEQ ID NO: 28532 - protein, 177 aa, Homo sapiens
LEKPVPGASRTQVQHRASTTPNAWDQQCFECQVVLERLHHIHQFNSPHLKTPNRKHCDEHFPGASCQHSALDLVAFWIWGFRLETLNLYTKVYSLQCSCWRPKATFCIKTCQMHTILTHLTDARCPENPRRPAGQHSETLSLQKIQQLAGVVACACGPSDWEAEAGGSLETRRSRLQ

SEQ ID NO: 28533 - protein, 36 aa, Homo sapiens
LLSVASGSSLPLFLLVPINELFSALGKKSPPAIMRI

SEQ ID NO: 28534 - protein, 83 aa, Homo sapiens
LLAQERVPEEGYLTGAVAFRRGMEPLSTHSLQGSRRVSLRRKCDDGNRGWKMEEDPESRNAGRKEKPGFSPKASRWNTALPPP

SEQ ID NO: 28535 - protein, 48 aa, Homo sapiens
LMVAFVLSNFTENAVVLTSGLSVLLASKCSTVLIPLLLECIVKRLEYD

SEQ ID NO: 28536 - protein, 155 aa, Homo sapiens
VRGTRIFPDYPFPARSVRTPSPAATRDGGRGAFLWAHPLSAVGTLNFIQRDLCRRGWERFSSPGGYLPLPGRPSPASHGFAFRASSLRPVRCQLRGLQLRSFSLECSKTQQRLREFHWNLPGVLSPRTAPAPSVLGSHHFSPKIATLQRRRNSMA

SEQ ID NO: 28537 - protein, 174 aa, Homo sapiens
LLSSFLTSNFLFNPLLPDSLYSVEARSQRFPVPPTSPCWCLHLLPSILQCLLLWAWPQGYGQTPVPSQRPLVIVPWHVGRGPAGSAEELRMEAAEEALMGPTIPDPSLLPGGPLVSFLVWAEAITWMPTWEGTSNVGPQPLSSSKSLHSHGDTLHLFPRDRLDPETLDPGPPLE

SEQ ID NO: 28538 - protein, 127 aa, Homo sapiens
LLSSFLTSNFLFNPLLPDSLYSVEARSQRHVGRGPAGSAEELRMEAAEEALMGPTIPDPSLLPGGPLVSFLVWAEAITWMPTWEGTSNVGPQPLSSSKSLHSHGDTLHLFPRDRLDPETLDPGPPLE

SEQ ID NO: 28539 - protein, 51 aa, Homo sapiens
MVKRLLLQRIQWERVNGLLDVNSKVLLIRIPISYWVWKGGEKDREFLLGPN

SEQ ID NO: 28540 - protein, 76 aa, Homo sapiens
LLSSSMVKRLLLQRIQWERVNGLLDVNSKVLLAKGHPAWSRARGDLTLRKSGISNLQLPPPPHTQMQSHPGGSKKC

SEQ ID NO: 28541 - protein, 46 aa, Homo sapiens
MERDQITRNIGVDSCPNQTAFVWIFLFNLIGYSKDFFFPIFDDWSP

SEQ ID NO: 28542 - protein, 231 aa, Homo sapiens
VLSLFPSRGWAGAALGPKVAPGQQPSQQHSLYGAEEEQQQQDGEVVNWGRQGTGRCSGASPCVSGAQRAEHQWVTGEKQGRLGKGAGLTEQWVAGGGAGQGLHQGGVEDEVTQQQCHLVAYALNGPEGQQPPAHVSQQQCLCRHQESDDGLERRVLQPQLEGEKSGPSRRGGRRWASGAWGLASGRASSLPPASSSPLSASSRLDSPSPGSRAPAAGVGLGSSDHKLRIPS

SEQ ID NO: 28543 - protein, 139 aa, Homo sapiens
LQGWGLGLLPGEWSQILGSVPWGTRSGRAGCRLLVRPPPHQTVLTLWMRQEEHLGPNLPASQPRALLGLPSSWPYLPLDPGPGLAPLGAMGWAHPLLCGGGGPPALAVTILHRTVLGPMDLVREGWGWASLVPIGVGGL

SEQ ID NO: 28544 - protein, 54 aa, Homo sapiens
MTGWSLLFKFQIDIPDKRCLSPCLSSDLHSTVPGKVEPPASPWLCRLPVLEQDG

SEQ ID NO: 28545 - protein, 47 aa, Homo sapiens
MTGWSLLFKFQIDIPDKRCLSPCLSSDLHSTVPGKVEPPASPCPSRC

SEQ ID NO: 28546 - protein, 214 aa, Homo sapiens [sequence omitted]

SEQ ID NO: 28547 - protein, 39 aa, Homo sapiens
LGLSGTLNAMKAVCVERLKCISKPGLIRGTRKNRPMCIL

SEQ ID NO: 28548 - protein, 60 aa, Homo sapiens
LFTLLPAIDQKREEEKRNKKSSICSKRQVLQFERLVHYNCFFLFWKAVVINTKGIDNLGP

SEQ ID NO: 28549 - protein, 94 aa, Homo sapiens
LRKRSQIKRMLCTEGVENASYVTESRSVVPCRLAGADSKGTGRSLQAAAPNPRTFAVLGRITAARGEVATVMNSAMWHQTATQTTVSSATLLLR

SEQ ID NO: 28550 - protein, 39 aa, Homo sapiens
MAAALIANTVKSSLGPVGLVKMLVDDIGDVSITNGGAPS

SEQ ID NO: 28551 - protein, 50 aa, Homo sapiens
LEIQAQVLESLSCRDIYGNTLNLDSLAITSRVENTRREKNIELRFYNILY

SEQ ID NO: 28552 - protein, 121 aa, Homo sapiens
LRQHQHPYSQFQTAESENRSYEGTLYKKGAFMKPWKARWFMLDKTKHQLRYYDHRVDTECKGVIDLVEVEVEAVAPGMATMGAPKSVDEKAFFDVKTTPRVYDFCAQDVPSAQQWVDRIQS

SEQ ID NO: 28553 - protein, 39 aa, Homo sapiens
LENHNTSFTNQEIDSETLITHPTSQLTVELGLKFQGRFS

SEQ ID NO: 28554 - protein, 64 aa, Homo sapiens
MWPWVPWSSPSPSSSTLGHRPTSTPASWLPVRSSSSPRAPSWPCWQLLWTATSGSRSLSGTRWW

SEQ ID NO: 28555 - protein, 186 aa, Homo sapiens
LYRPALEEMRRQIRSSTTSMTLVTKSLKCLRPHYGKLKEMYENMAPGENEHFAADIISVLAMTMSGECECLKYRLVGSQKELASWSHEYIRHLAGEVAKEWQELDDAKKVQQEPLLTLVKEIVPYNMVHDAEHEACDLMEIEQVDMLEKDIDENAYTKVCLYLTSCVNYVSEPENSVLLRCALGVF

SEQ ID NO: 28556 - protein, 108 aa, Homo sapiens
VAECVAAAIRHFSFLPLYEEGCVCFPLCHDCKFPEASSALQNWGYSHVTDLRPRICKEKVLSWLLGLEQCILGSLKEAVEMSPRRETRRAPQAHQLFVGSLQTCHSSG

SEQ ID NO: 28557 - protein, 85 aa, Homo sapiens
VAECVAAAIRHFSFLPLYEEGCVCFPLCHDCKFPEASSALQNWLEQCILGSLKEAVEMSPRRETRRAPQAHQLFVGSLQTCHSSG

SEQ ID NO: 28558 - protein, 73 aa, Homo sapiens
VCRRGHQGGYSHVTDLRPRICKEKVLSWLLGLEQCILGSLKEAVEMSPRRETRRAPQAHQLFVGSLQTCHSSG

SEQ ID NO: 28559 - protein, 60 aa, Homo sapiens
LEDCIRMTHFVPPPKDKKKKDKDDDGGEDDYENCNLICGDEYGPETRLSRSQLNEKETPF

SEQ ID NO: 28560 - protein, 10 aa, Homo sapiens
LRCKGIYMGT

SEQ ID NO: 28561 - protein, 9 aa, Homo sapiens
VGDYDQSKR

SEQ ID NO: 28562 - protein, 18 aa, Homo sapiens
LKTPPLLRNTPKLCSFCH

SEQ ID NO: 28563 - protein, 247 aa, Homo sapiens
LVSSGPCRAWAKSRRTVATSWACTAAHSWRPSGSSEVLSGARNSSCSYLARIHDSRSSLQDQGSTEKALGTPSQDFCPYPRDRLRFAHPQQPSPRSVPSRLPRRVPRGLGTASRVAFPHAVGRVVANSRQHQGQLPWPVVQVQRANAGQVCAQVAVDARTLDADEGAQVQAGPRGVCGRSVEVGSQPGSTGTPAFTTLPSPSAASWHSLGAPQSTQIEFPLAFRIAWMATASLWLSVRSCREGLGWH

SEQ ID NO: 28564 - protein, 96 aa, Homo sapiens
MPGDATSPALGGGGRSSVRRGHTKASRIIASTPSPTARRRPLRAGTPPLSDCCRVSLRLRPWRVCHLRTTTTTTHSTLKTPCDPGMHSTKSVWPRI

SEQ ID NO: 28565 - protein, 234 aa, Homo sapiens
VSTIELQKTTATMIHKLAIRALIGDYEDGILHENETSHEMKKQTLKSLIIKLSKENSLIIQFTSFVAVEKRDENESPFPDIPKVSELIAKEDVDFLPYMSWQGEPQEAVRNQPLLVSSEWQELRSSKPKFRAKRKMKLSKPEVSEDFEEDGLGVLLAFTSTLERGGVEKLLDLNWTESCKPTATEPLFKKVKKVHWKHLLLAFFVFLLQPLVPLFPRLPALTMLLPCLLPHIVR

SEQ ID NO: 28566 - protein, 78 aa, Homo sapiens
LGSGLRFSSGPGGSTAASGALGPAQAGESRRQDPGTPWKPGNDRVSLCRPGWSAVGRSQLTATFAFRVQAILLPQPPE

SEQ ID NO: 28567 - protein, 102 aa, Homo sapiens
LTCLPVTRTTLQAFLLPLPHSSWLVQLGLSTSTPGWILSFSWLQGKLSLSASPSPPPPPVLQLAILAASQLSCLNSYLIAWTEPPRMSRRLPPLSHGPEILP

SEQ ID NO: 28568 - protein, 25 aa, Homo sapiens
MESLSSQVRRLRRCTSLKGQWAGTD

SEQ ID NO: 28569 - protein, 148 aa, Homo sapiens
LHKLNKKLVWALHPLWQANSCIKLLGEMGGQGKDVKPKYSRNPPPVSLPSPILLPVRNATRTLTLFLALAASFPKSQCFPFLNFPSIKLKTDVLINQAVLEGYCIGRQGAVVDLTFNPSFQRYFLNNSKREVLGIKVTVHLILFFVLV

SEQ ID NO: 28570 - protein, 15 aa, Homo sapiens
LLFLVFLEMLSPSIF

SEQ ID NO: 28571 - protein, 160 aa, Homo sapiens
VVVVHCGGISISGNVYRKKLKYLAFLHKWMNSNPSRGTYHFWAPTTSGSPAASSGGPRGMLPRETKEARPPKTASRCLTASHHPMTKKQVVVPAALQVVHLKPTRKFAYLGQLDHKVGWKYQTVTATLEEKRKEKAKIHYQNKKANEATETGRKERGEGN

SEQ ID NO: 28572 - protein, 25 aa, Homo sapiens
MHFKARPDSGYKEEQTYVHFVGRKL

SEQ ID NO: 28573 - protein, 87 aa, Homo sapiens
VIKLGLTRGSGSPHVLSLFYLPIKLLQDNTLIWHGHRGSKPVAPNRIISAADNKQKRSQATAILKKKTINSEIQLRNNVSFKIRLVA

SEQ ID NO: 28574 - protein, 143 aa, Homo sapiens
VIKLGLTRGSGSPHVLSLFYLPIKLLQDNTLIWHGHRGSKPVAPNRIISAADNKQKRSQATAILKKKTINSETQPRQTEGNGALIQLQSPQSTGHLDPEEKLVPSTSSPVLPGALHSLLVYVVAVLSLIQLRNNVSFKIRLVA

SEQ ID NO: 28575 - protein, 119 aa, Homo sapiens
LPARNLNVLACSTRVSLNCPDFCPSIATISPHSGCPTQGAVYACPGPVLRIPSSPLAALFRASRGLWHHQAHSPGLRSPKVGPSDPGLSINQAGPKRRRHSNPGKLILFSVPGVAAASG

SEQ ID NO: 28576 - protein, 135 aa, Homo sapiens [sequence omitted]

SEQ ID NO: 28577 - protein, 65 aa, Homo sapiens
LLQRDPGAGPGAARAAGRCEPQVYPRGIRVTSLQTVCHDSPPRTGGIKWEPFPMPLPRSAPRWPG

SEQ ID NO: 28578 - protein, 51 aa, Homo sapiens
LCVIQVHFSGYQVATYLKWCESYSFGTVVDFQIGKSKGPKRQLTVFPRAFC

SEQ ID NO: 28579 - protein, 187 aa, Homo sapiens [sequence omitted]

SEQ ID NO: 28580 - protein, 52 aa, Homo sapiens
VSGGLGGGGRSRGCLPASPLRRQHRLPGRGRPAGSSARSRARNRHTMHPAAF

SEQ ID NO: 28581 - protein, 268 aa, Homo sapiens [sequence omitted]

SEQ ID NO: 28582 - protein, 20 aa, Homo sapiens
METSALCGSQVYWLSISSSA

SEQ ID NO: 28583 - protein, 136 aa, Homo sapiens
MHIRKAMKYLKDVTLQKQCVPFRRYNGGAGRCAQAKQWGWTQGQWPKKSAEFLLHMLKNAESNAELKGLNVDSLVIEHIQVNKAPKMCRWTYRAHGWINPSMSSPCHIEMILTEKEQIVPKPEEEVAQKKMISQRN

SEQ ID NO: 28584 - protein, 103 aa, Homo sapiens
LHLLVLPRLWSRSNLTGIASCVPTTNISLMDLTCHLEKPAKYDNIKKVVKQALEAPSRASWATLSTRLSCLTLTVTPTLPPSMLGLALIDLATATEWWTLWST

SEQ ID NO: 28585 - protein, 79 aa, Homo sapiens
LLVLLPPPFPSQPGGSSRLPQSPVHRLSLVLCAVHLSSSLQFNAIISPHHLSVPWNVCCQMSPVKPTNACDLASLFYFV

SEQ ID NO: 28586 - protein, 123 aa, Homo sapiens
MTQIMFETFNSPAMYVAIQPVLSLYASGRTSGIVRDSGDGVRVTHTVPIYVGYALPHAVLHLDLAGRDLTGYLMKILTERGYSFTTSAQREIMPHIREKLCYITLDFEKEMATAASSSSLEKS

SEQ ID NO: 28587 - protein, 112 aa, Homo sapiens
LTQESALEGEHQRSFRKPPGPRAPCPHPTHVSLSLGEARGTRPHQPNIKDTIGTAAPAAPTPHRRLHLHGHPLRRTVDHQPPHHPRAELLQRDDAVPTTSLFFFFILLSLCF

SEQ ID NO: 28588 - protein, 44 aa, Homo sapiens
LAVAALSFSLTSQPSTLLRPGIKEEQEEERNEMKNRKKKEKKHL

SEQ ID NO: 28589 - protein, 26 aa, Homo sapiens
VRALLKFSSQAVIQSCPAALLLAPGI

SEQ ID NO: 28590 - protein, 44 aa, Homo sapiens
MFPFYSEEEKQRNTSWRRTELKEPGMVTSGRKCVLSPSREAFVS

SEQ ID NO: 28591 - protein, 119 aa, Homo sapiens
LSFRQHLPSAVCVRKPILSCLPGPRAAAVREPAFVAHGATTQSGARLLSGPGYWHFPGAHGASAPIFPMRPQPRGGSGRKENTEKQRNTSWRRTELKEPGMVTSGRKCVLSPSREAFVS

SEQ ID NO: 28592 - protein, 62 aa, Homo sapiens
MRRGFHLGLSSGMTSSVHLLVFKDHLLSMLSCCQGACCPSTPHEGTRSTVSWIPPTYKAATH

SEQ ID NO: 28593 - protein, 73 aa, Homo sapiens
LAAAPQESWGAHERIPHPGLSSGMTSSVHLLVFKDHLLSMLSCCQGACCPSTPHEGTRSTVSWIPPTYKAATH

SEQ ID NO: 28594 - protein, 62 aa, Homo sapiens
VLWRRTEGLSSGMTSSVHLLVFKDHLLSMLSCCQGACCPSTPHEGTRSTVSWIPPTYKAATH

SEQ ID NO: 28595 - protein, 105 aa, Homo sapiens
LSYLSYLFSNSTPGSPCPRALLASAKLLERPVYTCCLPSSPPISSSTHCFLTRSTPWKHAHKGSQCPRQAPAGVSISCQASSSASSCGPGLRAMDRLLSHPRDPS

SEQ ID NO: 28596 - protein, 68 aa, Homo sapiens
LSYLSYLFSNSTPGSPCPRALLASAGSQCPRQAPAGVSISCQASSSASSCGPGLRAMDRLLSHPRDPS

SEQ ID NO: 28597 - protein, 106 aa, Homo sapiens
LSYLSYLFSNSTPGSPCPRALLASAKLLERPVYTCCLPSSPPISSSTHCFLTRSTPWKHAHKAGSQCPRQAPAGVSISCQASSSASSCGPGLRAMDRLLSHPRDPS

SEQ ID NO: 28598 - protein, 66 aa, Homo sapiens
MVSENPGPSEIRVGCKIESPAPTGSQCPRQAPAGVSISCQASSSASSCGPGLRAMDRLLSHPRDPS

SEQ ID NO: 28599 - protein, 47 aa, Homo sapiens
LFPAGSQCPRQAPAGVSISCQASSSASSCGPGLRAMDRLLSHPRDPS

SEQ ID NO: 28600 - protein, 87 aa, Homo sapiens
LTVTTRYVFGVFFGFVLFCFGGGHGLSLPPRLESSGMISAHCSFYFLASSSLSTSASQRTGITDVSHHTRPTSGPYTRLIYLEMAGN

SEQ ID NO: 28601 - protein, 129 aa, Homo sapiens
LRSIPFMGQRGAVGPPAALGVEGGAAPAPLTLACPSSRYFLDSTSETSLMPKTWISWAEIRSHTSSLSMSHPSLCCRISPTFASRSLIPLRYPSKSTSKNVSTSSTAAALMGGTALCTALQASLAAPRL

SEQ ID NO: 28602 - protein, 159 aa, Homo sapiens [sequence omitted]

SEQ ID NO: 28603 - protein, 64 aa, Homo sapiens
VRERREREKKGRGASGEVRRGALREAERGRSSRGTGAHIPLCYKSRRKFFFRGLRCSMPFPGQP

SEQ ID NO: 28604 - protein, 42 aa, Homo sapiens
LKIYFLMVVIPLHSFEFGRMAYTSEKYHYFLHWTARYFCLEK

SEQ ID NO: 28605 - protein, 145 aa, Homo sapiens
LPLSLPTLGVLPKALSMRAQGLSCGYPARPLQPFLEHLAGSGITKRTAPGCAPLRWVPQIRGCPLTRLAQRGADTRTRENLFYSRFPGLQLPAAETVRPLCLSALPAAPLSRFLSRLTPPTRSSLAPLLLPLLLLLFLLLHHRPR

SEQ ID NO: 28606 - protein, 47 aa, Homo sapiens
MLKYQGSRYVLRGVVAAAKEKCIVIMSKDACAVCSILRQKLYQGFFS

SEQ ID NO: 28607 - protein, 54 aa, Homo sapiens
MKGGNGPLRGALKSAVGGEGPGHTPSPPDSSPSGSAQPWTLDLDKKREAALWWI

SEQ ID NO: 28608 - protein, 56 aa, Homo sapiens
LTFFLGNSTVPPSFRKVKDTGFLDALSILSGCNVLLPEENQIIMWGLPLFLEYSYP

SEQ ID NO: 28609 - protein, 92 aa, Homo sapiens
LQECDTSFPQQRAGTGDNFLTHSLRSRLSRQREQPTQRPPRPCPWPLLAFALKFSVVVCLGLAGRNKHTPSDSPQPIFAFCNRFSCPSLVLG

SEQ ID NO: 28610 - protein, 34 aa, Homo sapiens
MWFPAFLAQSGILLFCSGFQHSSPSPGTLWVCPA

SEQ ID NO: 28611 - protein, 20 aa, Homo sapiens
LNPAARRAGRAAQSLKTRQL

SEQ ID NO: 28612 - protein, 85 aa, Homo sapiens
LVPNSMAGSVAESYDTGSGFEDRETCNVAGAVVHFINRFVDKVCTESGVTSDHLKGLHVMVPDIVQINIKTLEAVQRENRRLMPI

SEQ ID NO: 28613 - protein, 176 aa, Homo sapiens
LFYRILQDDTESLMPIAYTPTVGLVCSQCGHLFRRPKGLFISISDRGHVRSIVDKWPENHVKAVLVTDGERILGHGDLGVYGMGIPVGKICLYTVCPGIWPDRCLLVCIDVGADNIALLKGTFYMGLYQKRDRTQQSDDPIDEFMKAITDRYGWNTLLQFEGFGHHNAFRFLRKYQ

SEQ ID NO: 28614 - protein, 68 aa, Homo sapiens
LAPGRGRCPGAGRRDLAPNPGGPGAVAQGPGRGPGGGALRARPGAVPGGLAPRLLPSLRAQSPFGRAS

SEQ ID NO: 28615 - protein, 206 aa, Homo sapiens
LLLPPPNCRKLQLLMRMISQMSQNVDMSKLHDAMGMKSPMIHTFSRCVLCCAEKVDLDKLLAGRLVSFLLDHHQEILQVPTYLQTAVEKHLEYLKKGHIENPGDGLFVPLPTYSYCKQISAQDFEKQKVSTSQAAVTELIENVIKNKSLPLKEKRKKLKQFQKEYPLIYQKRFPTTEIEAALFGDKPTIKQPMLILRKPKFCSLRY

SEQ ID NO: 28616 - protein, 121 aa, Homo sapiens
LPGLHLPRELCCHFTSTHHIPPTDYHLSRSGPTWKMPELAMPFQTLIWTAHQPLKGPFSLVSFLPTPSVLPCPTRLLQGRGVPGSQIVDTSFFLCTGFTQLSFFFQNCSSPTDVCIWTNST

SEQ ID NO: 28617 - protein, 129 aa, Homo sapiens
MGFPAIFRTKCQVQVQVQGQARGGALSLTRPPLFSGIIAPTSPSRAGPSRDPRPAPPRRAPQEPPPPAGAAPVPWSRCPRSVPPKDLGARAGEGVEGGVEARYEPVGASPTPQSQRQTVLGRTDARAEG

SEQ ID NO: 28618 - protein, 134 aa, Homo sapiens
MGFPAIFRTKCQVQVQVQGQARGGALSLTRPPLFSGIIAPTSPSRAGPSRDPRPAPPRRAPQEPPPPAGAAPVPWSRCPRSVPPKDLGARAGEGVEGGVEARYEPVGASPTPQSQRQTVLGRTDARAERPSSFR

SEQ ID NO: 28619 - protein, 135 aa, Homo sapiens
MGFPAIFRTKCQVQVQVQGQARGGALSLTRPPLFSGIIAPTSPSRAGPSRDPRPAPPRRAPQEPPPPAGAAPVPWSRCPRSVPPKDLGARAGEGVEGGVEARYEPVGASPTPQSQRQTVLGRTDARAEWASASKS

SEQ ID NO: 28620 - protein, 145 aa, Homo sapiens
MGFPAIFRTKCQVQVQVQGQARGGALSLTRPPLFSGIIAPTSPSRAGPSRDPRPAPPRRAPQEPPPPAGAAPVPWSRCPRSVPPKDLGARAGEGVEGGVEARYEPVGASPTPQSQRQTVLGRTDARAECLEQLKSMCHLRFCRER

SEQ ID NO: 28621 - protein, 58 aa, Homo sapiens
LDPADSARPGLPRHGAAALLRQSVLAIPRALRPPRAGAGRGQLGLRGRRGGLAVRGDA

SEQ ID NO: 28622 - protein, 27 aa, Homo sapiens
LAVFLTFLKQITDTVLPEDFSNSVCKL

SEQ ID NO: 28623 - protein, 86 aa, Homo sapiens
LQPGRALTHLSLHGSEEASREERLSHPSPRWLPLCGRQVLQSKCKRTKKKKKKKKMRSSSLFGKQQSLLQILWDSCWRGAAHFQDL

SEQ ID NO: 28624 - protein, 202 aa, Homo sapiens
VGVWTPAGLSTPGAKGTCTPSVFSFAVIEIPRGAAQPPGIDGISLAVVCAAFIRIHPARRHPARNGSRLACTPTPRPNAGLEVVSSARVAASLPSEGGWTSGAPRSSGLSLPGSAWQPPPLPVLRKPAWPGSPAVKNESKFPNRGSRNFPRRRLPPAPVSGEPPERCKLAREIRWRLWKAHEGWGGGAKRPLGDPAWSGVKR

SEQ ID NO: 28625 - protein, 251 aa, Homo sapiens
LINGGAGSSGSREPVCARVGGGGRAWRPGFDRRAPGAEPGARGGRVWNCPWYARPLLLAHLTPLPHLTPLPGFFLCLPLRTGTENFPGIDGISLAVVCAAFIRIHPARRHPARNGSRLACTPTPRPNAGLEVVSSARVAASLPSEGGWTSGAPRSSGLSLPGSAWQPPPLPVLRKPAWPGSPAVKNESKFPNRGSRNFPRRRLPPAPVSGEPPERCKLAREIRWRLWKAHEGWGGGAKRPLGDPAWSGVKR

SEQ ID NO: 28626 - protein, 67 aa, Homo sapiens
LFMIGMNHEKYKNSLKIISKASCTTNFLAPLAKVIRDNFGIIEELITTVHAITATEDPGWLLWETVA

SEQ ID NO: 28627 - protein, 59 aa, Homo sapiens
LKLGREPATAPRRGRRVPVCGVPVAKLKVALGRHRCGHIFSQQDHPPEGHLWGLPTGRE

SEQ ID NO: 28628 - protein, 75 aa, Homo sapiens
LEGRGPSALGSQGALPAQPGLSWEPLAQRLSLANLGGCVHPARPSCGLHSSPCSLLPRFESRVCGHSLPSCTCPF

SEQ ID NO: 28629 - protein, 128 aa, Homo sapiens
VPAAVTEAGSRAGGGTRDRSSLGKRRGPPPTTVRITASPPAPPGPMPRTGRRGWQGARARGGKQEVDPAGAAQGAALQMQHGVAGRAPSAPEEVSARSPSRPGDTGRDAGADAAGPAGETVFSGRGPL

SEQ ID NO: 28630 - protein, 11 aa, Homo sapiens
MCIPLFVLKFM

SEQ ID NO: 28631 - protein, 3635 aa, Homo sapiens
LIHIKKYGEHNVLNSRRGILTLMWDKNNKLSLTLHKQYPTCGLCGNFNSTPGQDINEHIANSKIPGDCPNAVGKSYEVCEDGIQHCNKIIGTYFEKCGKVAALSNDYKMICIDEYCQTRDKTSTCDTYSELSRLCASDGPGTFESWRSDSDVVCGTQRCPEQHIYKECGPSNPATCSNVAPFQDSECVSGCTCPEGYLLDDIGEKGKCVLKAECPCESSGTVYQPGEVREGPCGSQCTCQDAKWSCTEALCPGRCKVEGSSLTTFDGVKYNFPGNCHFLAVHNEDWSISVELRPCPSGQTGTCLNSVTLLLNSSVPVDKYVFNSDGTVTNDKIRNQGYYYSDKIQIFNASSSYLQVETYFHVKLQIQIVPVMQLYVSMPPNQFTDTVGLCGSYNNKAEDDFMSSQNILEKTSQAFANSWEMMSCPKGNPSSCISIEKEKFAERHCGILLDSSGPLASCHPIVNPKPYHEECKKYTCTCENSQDCLCTILGNYVKACAEKETYIVGWRTGLCEHSCPSGLVFKYNVKACNSSCRSLSERDRSCDVEDVPVDGCTCPDAMYQNNEGNCVLKSQCDCYINDEVMQPGKLIHIDDNKCVCRDGILLCQIPIDLTLQNCSGGAEYVDCSDPKAQRRTNRTCSTRNIPVFDENLPCKRGCFCPEGMVRNSKGICVFPNDCPCSFGGREYDEGSVTSVGCNECTCIKGSWSCTQNECQTICHIYGEGHVRTFDGKSYSFDGLCQYSFLEDYCGHENGTFRILTESVPCCEDGLTCSRKIIVAFQDQNIVLQDGKVTAVKSTESKKCELNANAYSIHTVGLYLILKFQNGIIVIWDKNTRLSVILDPNWNGKVCGLCGNNNGDLKDDFTTRYSSVASGALEFGNSWKTSQECSDTVAQTFPCDSNPYCKAWAVRKCEILRDSTFRDCHNKVDPSAYHDVCIEEACACDMEGKYLGFCTAVAMYAEACSAVGVCVSWRKPNLCPVYCDYYNAPGECRWHYEPCGTVTAKTCKDQLVGQKFSSLLEGCYAKCPDSAPYLDENTMKCVSLSECSCFYNDVIPAGGVIEDNCGRTCYCIAGQLECSETAPTNSTFAVSTTTATTILSTGAAITLVTGGPSTAASIPAITTSSSETTGTTLGPLTEPFTTGITETSVPIISTSGNAGMTGVVSPTVTGASGMAGTTGGVDAATTGAASENTSERAGTPRVSGETPAVGGGSTPGEAGPGATVSGSTGVSAGSITASPGASATSSESSKSGTTGPSVGGKTGATSSEATSSEGMSGVTGQSLGSTAGSDSEITAKTSFTGSSPPGKLTRPSPGSPGHFSGGTTEWGNVATTGAAGENTSGALGSTEGSVEATTSAGSGNTAGTSGTGDTGPGNTAVSGTPVVSPGATPGAPGSSTPGEADIGNTSFGKSGTPTVSAASTTSSPVSKHTDAASATAVTISGSKPGTPGTPGGATSGGKITSGWSSSGTSTGASNTPGATGSSTGQTDTSGPSAKVTGNYGQSSEIPGTIKSSSDVSGTMGQSDTTSGPSVAVTRTSEQSSGVTVASEPSVGVSGTTGPLAEISGTTRPLVSGLRTTGSSAEGSGTTGPSSRESVTTRPLAEGSGTSGQSVTGSRATGLSATELGTTVSFTGGLGTSRSSARETRTTGPSADGSGTTGPSVVRSGTTRLSVGVTRATESSPGVTGTTTPSAEESRTTGPSVLVTGTTGQSGQGSGTTGKSFIESGPSVVGSGTTGPTSAGLGTTAPSTRRSSTTKPSVGRTGTTGQSGAESGTTEPSARVAGVTGTSAEVSGRIEPSATESSTSRPLGETTGTTIPSMEGSEATGPSVIGSETTRLSVIGSGTTGTSSGGSGATRSSGGGMGTTGQSTARSETTGPLFGLTGTFGQSATVTGTSSNSAGVTTPEKSPGVAMTTGLLVEGSATTQPRILESETTESSAGVIVTSGQSARVTGATGPSAGETGTTEPSTEGSVAAVLFVIGSETTRPLDIGSGTTGTLSGGSSTTRSSDGTTGTTRKSTARSETTGLSGLTGTSGQLAGVTGTSSKSAGVTVTSEKSAGVAVITGSFVERPVTTGPPLLESETTRPSGGVTVTSGQSARVTETVGASAGVTGTTGPSTEGSGATGPSVVGSGTTRPLAGESGTTESSAGVTGTRPSSSRESATTGPSDEGSGTTGLSAGVTVTSGQSVRKTGTTGAPAGVTETTRPSVVKSGTTGPSVIGTRTTGTSSGGSGATRSSGGETETTGQSAVKSGTTESFTRLTRTSGQSAGMTGTSAQSAGVALTSPFVEGLVTTGSSTVGLETTRPSAVGSGKTGPPVVKAQTTGPSAGVTVTSGQSARMTGASGPSVGVTGTTGPASKGLGTIRPSVVGLETTELSAEGSGTTGPPIVGETTVPSAGVTVTSGYSDRVTGATEPLAGVTGTIKPSVAGSVTTGPSVTGVETTAKTTSGGLSTTISSVGGTGTTGQSPERSGTTGPFTGLTGTSAQSAGVTMTSIQSAGVLVTTGLNVDGLGTTGKALIGSGTTGLSAEATGTIGPSTEGLEKTGPSITGSGTTRPLVTESWTAGTSSGGHSTTSPSVRGTETTGQSAAESVTTGPVTGYTETSGPSAGVTVTPRQSPTVTQTTGSSAAVSGTTVQSLTVSGTTRPSSGQTEITGSSVKESGTTESSAVRSGTTGPTAGVTGTNGPSSAGVTGITGSSPGVTGTTGSSPGVTGTTGSSARSGTSIPSVGKTGTTRTSVEESRTTRPSAGITGTNGLSAEVTGTTGPLAGVTGTTGPSAGVTRTTGLSAGETGTTGLSPGVTRTTRSSAGLTGKTGLSAGVTGKTGLSAEVTGTTRLSAGVTGTTGPSPGVTGTTGTPAGVTGTTELSAGVTGKTGLSSEVTETTGLSYGVKRTIGLSAGSTGTSGQSAGVAGTTTLSAEVTGTTRPSAGVTGTTGLSAEVTEITGISAVVTGTTGPSAGVTETTGSSAGVAGTTRLSAGVTGITGLSAGVTGTTGLSTEVTGTTGPSAGATGTTGLSVGVTGITGLSDVVTETTGSSARSGTGIPSVGETRTTSTSVEESRTTRPSAGIMGTNGLPAEVTGTTEPLAGGTGTTGILAGVTGTTGLSAGETGKIGSSAGVTGKTGSSARVTGKTGPSAEVTGKTGLSAGVTGTTGLSPGVTGTSGLSAEVTGTTGPSAEATGLPGVSAGVTGTTGSLAGGTGTIGLSAGVTGTTGSSAGVTGTTGLSAGVTGIAGLSAGVTGITGPSAGVTGTTTVSAGVTGTTGLSAEATEITGLSAGVTGTTGLSAGVTETIRLSAGVTGTIRSSAGVTGITGLSAGVTGTTGPSAGVTGSTGLLAGVTETTGQSAKVTGTTGQSVGVTGTTRSSGGVTGITGLSAGVTGTNGLSAVTGMTGLSAEVTGTTGLSVGVTGIAGLSAGVTGITGPSAGITGTTTISAGVTGTSGLSAEATGITGLSAGVTGKTGLSAGVTETIGLSAEATGTIGSSPGVTGTTGSSTGVTGITGLSAGVTGTTGLSTEVTGTTGPSAGVTRTTGLSAGVTGITGLSAIVTETTGSSARSGTSIPSVGETGTTRTSVEESRTTRPSAGITGTNGLSAEVTDNWTISWRDRDNWTISWGDRNSWIISCGNRDNWTISWSHRDNWTIS

SEQ ID NO: 28632 - protein, 59 aa, Homo sapiens
LPMQISSHLSSCCNPSLPPIGLSLPNLNSLYRDGREFPSHLSATVIWYWLPGALSSEGF

SEQ ID NO: 28633 - protein, 405 aa, Homo sapiens [sequence omitted]

SEQ ID NO: 28634 - protein, 155 aa, Homo sapiens
LQANLHRKFTAPGAGSCAPGVSSGTLENALFLKSHFSFTLRNMISFFFLSTQKEIGVCRLQAMPPSVSAAWSRRVCVGWTCASWLRVSGRAFVLAVSGWETCAGCPRGFAESLAVGGVTSAWGRSGSLGLEGSSLELGEILAGEREAGEVCSCIS

SEQ ID NO: 28635 - protein, 72 aa, Homo sapiens
LKMFETVPSKKVLIFLGGPGVACNRNRGFSHFLALAMHLVRGSGVKNNSGGNKDILGNLSKKELAQTESMHP

SEQ ID NO: 28636 - protein, 82 aa, Homo sapiens
LLSHTSGLWAFGSTQEGHSAGPPCALSCRGHSPRPVSSPTCHHWPLLSLGEKSRPGTHGGPHVDATCCCFLLARPPPMPSIG

SEQ ID NO: 28637 - protein, 83 aa, Homo sapiens
LTGQSLPTPLACLTCLIYSPTALQAALVHGLSLHQQVPSAPDKPLLVSPSPAKHPPVPPPVGLASGLWTDSCPIPETPRDRAL

SEQ ID NO: 28638 - protein, 93 aa, Homo sapiens
LTGQSLPTPLACLTCLIYSPTALQAALVHGLSLHQQVPSAPDKPLLVSPSPAKHPPVPPPVGLASGLWTDSCPIPETPRDRALARGPWPGWVG

SEQ ID NO: 28639 - protein, 110 aa, Homo sapiens
LLVLLVLFILQQHSRQPLSTGSPCIRTNNLWSVKIQAPVRFEWAVKSRVLLPQVPSAPDKPLLVSPSPAKHPPVPPPVGLASGLWTDSCPIPETPRDRALARGPWPGWVG

SEQ ID NO: 28640 - protein, 110 aa, Homo sapiens
LSTGSPCIRANLGPCRRKRLQTLMRLAAGFQYSSHKDPSLSAKEKHTDYHNEQVPSAPDKPLLVSPSPAKHPPVPPPVGLASGLWTDSCPIPETPRDRALARGPWPGWVG

SEQ ID NO: 28641 - protein, 31 aa, Homo sapiens
MLSAKFTSELRGSSKCWLKFIPRLVCKVCNS

SEQ ID NO: 28642 - protein, 49 aa, Homo sapiens
MLSAKFTSELRGSSKCWLKFIPRLVCNYLFLLRINLVGISVPVMGTKLF

SEQ ID NO: 28643 - protein, 88 aa, Homo sapiens
VRVLLPKTSPVCGACHTHPLPNHGLYLCLPVFPVRPILWECLVGCPRVHPTLSSTNGEDDKIEDFPGISALLPPDLQLHSLQSSLGQS

SEQ ID NO: 28644 - protein, 29 aa, Homo sapiens
LMGSLPYAFVLVLQKGNLTEDHAVLKKYK

SEQ ID NO: 28645 - protein, 47 aa, Homo sapiens
VDQTDDHQQPTHSRIRKKRVSPTSVWFQPYFCILKTLYGFSSSAPVH

SEQ ID NO: 28646 - protein, 161 aa, Homo sapiens [sequence omitted]

SEQ ID NO: 28647 - protein, 116 aa, Homo sapiens
LGRLLSLPTLPGPNWISAPGSSNFSKCEILSSVLEFSSAQTISATDRICENTSMSRLGIILRHHLASPASHFKEHLEMKTRKMSVSTLSNKLERKQLFFSFTKTYQMGTAQPSLEM

SEQ ID NO: 28648 - protein, 71 aa, Homo sapiens
MSRSLCCPQLPAAHFFPPVTFKSCVWDHGAADNLGFCQCVFLRVIGSQLTSIQQNQLHRRLTSGSHGCDGA

SEQ ID NO: 28649 - protein, 101 aa, Homo sapiens
LETQRRSPLLQCLRAPATRSPFLFPLFPPSSYPCVFKKCVRAWERATKTGENSSSDSTVCIAITSPGGKCVLRRVIYLGRERGLCLGFKKKEKKRKRKEKE

SEQ ID NO: 28650 - protein, 180 aa, Homo sapiens
LRPPPTTVETAHRDRGPSVQQIGKCCGRRPWALSAQASRGVEGLSPPTGGSRRGAANSARPRLPSAVDRVCRVLASSPKGPDGPRGPSQPAASSQTLKWEQSFQKGSAFGRPRPAQPRGPLIQRLAALGVRGPAGPLETPMRNELMLDARAPWAQLPSAKRAPKAGEWRTLQSKVILKEE

SEQ ID NO: 28651 - protein, 61 aa, Homo sapiens
LKVLRWCVAGRNPQFQIQTVGARSASGRRRLAVATGCGRLDSGDCVWLHMLRFPLPVVLGL

SEQ ID NO: 28652 - protein, 28 aa, Homo sapiens
LRVRLTFGFAKREVFRFLPGQVEPVQPP

SEQ ID NO: 28653 - protein, 114 aa, Homo sapiens
LGIHVLSSPSPEDLKSRCLYHRQEPSGRVPGRRPDQPGGGLPVWGEVDSLVQPSQLQILEETEQGAQASGSHGPCLRACQHGRCVCSVGTDSSGAGEEAGGQEQHTDTGRQLEV

SEQ ID NO: 28654 - protein, 128 aa, Homo sapiens
MPIVDFHLQKLPAAAAAPFLDKSHSSSPGSPKTAELFFTERTPWFHQFPQIPVAPDLSSRGTRRKDFLSTRRILGAAKVPVVSFYHSRGVLLKASERASGGSKAVQPGRKEKETPRHRKPRFSRRKNR

SEQ ID NO: 28655 - protein, 127 aa, Homo sapiens
LVLCVHLVHLRSCIYPAHAIDPALFASPVAASGHEKDRITGSQIHKPHQEDHPRNAWRLRSSLRLLHLETQDEDPAWGCQRGLKRQNTPEEPGATTQHHCGKTAAGNVLSPACSTSVHAFPPSGSLA

SEQ ID NO: 28656 - protein, 119 aa, Homo sapiens
VAWRGGGFKSPRVSDHSDRSPNFSQSPGARGAFQSSRVARGGASLDPEASLSTSTRPRASLLLQTFASSAKLRFSASDIRTGGFSSFSELLALEPSPLFPSPASPDPPSSEPNGLQRTK

SEQ ID NO: 28657 - protein, 260 aa, Homo sapiens
LAQVQWAGGGDSDKLSYSLKKRMPTEGPWPADAPSWMNKPAVDGNSQSEALSLEMAGLSLPSGGPVLPYVKESARRNPASAATPSAAVGLFPAPTEYFARVSCSGVEALGRDWLGGGPRATHGHRGQCPKGEPRVSRLTRHQKLPEMGSFWDDPPSAFPSGLGSELEPSCLHSILSATLHACPEVLLKDETKRIFLDLLNPMFSKQTIEFKKMFKSTSDGLQITLGLLALQHFELANSLCHSLKYKQNNASRLILRVVLE

SEQ ID NO: 28658 - protein, 47 aa, Homo sapiens
LPPSFLAVCDTEEIHVTCKAVLICDYGPMELGQSLWEAEGKDPGHFR

SEQ ID NO: 28659 - protein, 34 aa, Homo sapiens
VALWFASKLHASGKCPIPAQQTFLYSRYHCLQIS

SEQ ID NO: 28660 - protein, 37 aa, Homo sapiens
VAERMLLEYHVYNKSCRVEFLLDVYTFLHQSSSNPEW

SEQ ID NO: 28661 - protein, 148 aa, Homo sapiens [sequence omitted]

SEQ ID NO: 28662 - protein, 25 aa, Homo sapiens
LSSVRINNSEEMGPASLLLSRLFRK

SEQ ID NO: 28663 - protein, 41 aa, Homo sapiens
MNLRQKRWRGRCVSILQGETTQNDSFRESMSLHRTLQTQEK

SEQ ID NO: 28664 - protein, 176 aa, Homo sapiens
VRRRASQAVAFRVGTLGKALPQNSTDGLRRLAHLSNNWAGSRPLRPFISLLTKWRPRHPEMKPSDWPTAPRFVTTLPRAPPLPEAPAHSPAGGPKSAESRLEGGGAELAGSWKARETLFPPGRPDDRDWAGGRGGAPHLGPHLFFMPILQVHAPFLLSRQPRLRLKSASALICLSL

SEQ ID NO: 28665 - protein, 238 aa, Homo sapiens
LGYHVQPQCQPPAPHQAAGAALDLVQHGVPQQLPAPGSPGRILQSHHVLPQRLRHLHALRLAGAVVRPACPPTAQPLGQDRAGGLGGVQLEAGLGQGALLPEPAGSSQGGRVRTLPQAPAQGDHDGDAVPVQVLSGLRELLAPRLHHREAVEERPGGLGRARGAGPQQKQLREVPATRRLHPRGRLPEPQGPGPVPAGAGQGPRPLPELLSLAGDAAASLLQLGTGFLQGLLEAAAGI

SEQ ID NO: 28666 - protein, 126 aa, Homo sapiens
LGQHPPAAAPPGVRGRKPGRRGRGEGGPAREPLTFPGGDLRGDLGYPGLPRPTRRRGPTPGPGALRPDPRETAEPGLTLETTPWPRLPALTGQSQGTHQAARTVLGWRRWATEEAPRPPGCHLVYQ

SEQ ID NO: 28667 - protein, 106 aa, Homo sapiens
LGQHPPAAAPPGVRGRKPGRRGRGEGGPAREPLTFPGGDLRGDLGYPGLPRPTRRRGPTPGPGALRPDPRETAEPGLTLETTPWPRLPALTGQSQGTHQAARTVLG

SEQ ID NO: 28668 - protein, 16 aa, Homo sapiens
LGSPFQNKAMPIRQPA

SEQ ID NO: 28669 - protein, 268 aa, Homo sapiens
LQLAASDVPGLPSSSQHHLPDLSFAMLLSLLGACAVVGPFHGPEWEPVQGLLSQNHSCRDPQCCGNLLVLCLFLVWQVRHCWHQVTRTRFSTRNVIKVPLQKRAVPSMRCETVFKLTPEFFSPGKSRGLDSQQCAQRQRWGYRRSLQESWAQNLLSPQHPCPGPPSGVHTHSEPIFCTTSISNTCLLPQNSSWKAWQVPWCLHDGQTRPALDMCQEMEQLLLHSQERLVSLEPVISVRSRPTSMTLTTSLPNLLSAERLQFCPQRAPA

SEQ ID NO: 28670 - protein, 47 aa, Homo sapiens
VTVYGCICSVFLSLSCWAFETGFFAGGCLKHQVYLICEPILLQLVSS

SEQ ID NO: 28671 - protein, 31 aa, Homo sapiens
VAAADSLSRGAAEACGQCCQQLSDLARDHHG

SEQ ID NO: 28672 - protein, 76 aa, Homo sapiens [sequence omitted]

SEQ ID NO: 28673 - protein, 80 aa, Homo sapiens [sequence omitted]

SEQ ID NO: 28674 - protein, 132 aa, Homo sapiens
LLLTIVDTPGFGDAVDNSNCWQPVINYIDSKFEDYLNAESQVNRCQMPGNRVHCCLYFIAPSGHGLKPLDIEFTKHLHEKVNIIPLIAKADTLMPEECQQFKKQIKKSKNIKLKYMNFQKQMMKKKKNLLKR

SEQ ID NO: 28675 - protein, 12 aa, Homo sapiens
LFYSFPPSHYCT

SEQ ID NO: 28676 - protein, 37 aa, Homo sapiens
LSALEWVHVCLAERGGSTLLSAHAAQTWPLCEATAAH

SEQ ID NO: 28677 - protein, 17 aa, Homo sapiens
MLFFEGIQALIASWMNV

SEQ ID NO: 28678 - protein, 20 aa, Homo sapiens
MERMQGFQLMPSARLSSSQN

SEQ ID NO: 28679 - protein, 216 aa, Homo sapiens
MQVVREEGKSRQSQASPSSHANRRAGLTPTVPPTACFQAESGLKNLSEAFHLPAAKEKGFSSSLTCEVCKPDSHPLLRSGQEASLPAQIVTKFRWGSPSPGGVLPPAPLATLLMDPCGARQAGMGYGDSVSSQGLPATSSTPVFQSPRLSNLTQLQQEDTHQILAPQYQTSKSPEIFQHANFSCSLSSLSPRKDNDFLHPILEATALVLPHPRTPY

SEQ ID NO: 28680 - protein, 76 aa, Homo sapiens
MTVMKCRGPGCPQVSWQCVILRRFMLHVKLSSFVTMDLWSWDNLYGKQKARTPVILGRNNSMLMQKIMQCATELQR

SEQ ID NO: 28681 - protein, 93 aa, Homo sapiens
LGVRARGAAPGFCPPGRKATSTERLLRASPDVNSFYLPRPRSMSSSVSSAWVDHGHQASEIQLWILSIHCWALCPSWAQKLYTRLLVLSYKTK

SEQ ID NO: 28682 - protein, 210 aa, Homo sapiens
LPEQRATRWPFCWNFGVPVFQATSAKRGLCKETHSVVSAGAQGGCCAGTSFCGPWSNDSVWGSATLRPGVLAFPWGPWGECPYFSHEASAKRRFGKKGKHREAEEHVMETDRVEGARDGDKRKEVCFVPIQGSFCFMRLTCARLVAALDIHGLSFSLRFCGSRDTKHEDITGREGQVTPLPRGTPQLCTARVGLSSPRTRGQGVPISCKT

SEQ ID NO: 28683 - protein, 24 aa, Homo sapiens
MSSVKAARVASAPWWSQHTCLSRR

SEQ ID NO: 28684 - protein, 160 aa, Homo sapiens
LTLAWLFVKEGVEKIWLMGGEPLIQPDEVDIVAQLQRLEGLRTIGVTTNGINLARLLPQLQRAGLSAINISLDTLVPAKFEFIVRRKGFHKVMEGIHKANEPGYNPVKVNCVVTRGLNEDELLDFAALIKGLPLDVAFIEYMPFDGNKWNFKKMVAIRRC

SEQ ID NO: 28685 - protein, 110 aa, Homo sapiens
MLRRDTKHVVLVVATLVPPSWVLAAETGTPTSPRCEPGEATPAVRDGCASWPRQGYLRWSSTADGYHEGGGTLAERWRNVGGVRGWTGTPGLKRSFHLSGTTDACLPINT

SEQ ID NO: 28686 - protein, 43 aa, Homo sapiens
LKFFRCGRHGDHRIWFATERNLDADHFTSESMNCSHAFKSFSG

SEQ ID NO: 28687 - protein, 85 aa, Homo sapiens
LTMLSFFEMSLLFRCSEVPDMLKLEVAKSHFVNTFLLQFIGNIFGGEWPNHLLSNTHCVCAVVQGRREEGEVQRALCHPVYSEAR

SEQ ID NO: 28688 - protein, 62 aa, Homo sapiens
LRPRGRRPERSGPVLGAVSRPLCRSEPPRIRVSSGKTLAALWAVLHLGRLRTSQRPLSPAAL

SEQ ID NO: 28689 - protein, 172 aa, Homo sapiens
LLKLAYTCKTETKQEKKQRLLAWAEKKAAGKGDVPTKRPPVLRAGVNTITTLVENKKAQLVVIAHNVHPTELVGFLPALCCKMRVPYCIIKGKARLGHLVHRKTCTTVTFTQVNSEDKGALAKLVEAIRTNYDDRYDEIHCHWGGNVLGHKSVAHVTKLEKAKARELATKLG

SEQ ID NO: 28690 - protein, 96 aa, Homo sapiens
LGDRLVPGQSWEAVFREPPGLGCGGREAAPSCALGRGRAALLSSYSDPQVSGPHTVWLSEIKTSTIAMLIGQRMCCGHKTKLWRTEDSFQGSACIQ

SEQ ID NO: 28691 - protein, 94 aa, Homo sapiens
MGGVGQRLPFAHPPGSRCCPAPTERKERAETSVMGARTPPLGWLPGPTLPVCTLRGSAHLPVAPAHMSSGRTAGWALRSASLWASLQDHSCQGL

SEQ ID NO: 28692 - protein, 42 aa, Homo sapiens
LLFTYRPDGLVLVFSRLKVLHQVSCCCYLRKKSHKGVKSTWP

SEQ ID NO: 28693 - protein, 84 aa, Homo sapiens
LPEAAVWEFRSGGPSPPTRTGRGFCQMWAGPRGPWRAGPGPRPGWLGPRRCPPLATSSPGRVDSEARGLVRAHCRAERRSVLWF

SEQ ID NO: 28694 - protein, 42 aa, Homo sapiens
LCSSFTFCHDCEASTAMWNWKLFFPLWGLREIGGKDSWEEKS

SEQ ID NO: 28695 - protein, 97 aa, Homo sapiens
VGCTLPSIPIGPVPWSVSEPRGECSPPGAPGPPARHMVWPSLSPYPCPAPKGRKLQGPLPPTAQPLQAPWQLPLLEQKVPLSQPSADCLARCGDRLE

SEQ ID NO: 28696 - protein, 103 aa, Homo sapiens
VVVSLSWSHLWELGSYPDLSSSPAPPSSEVAAASGVILHIDRDLSHVVIWTAFLPVLISLLHFLRGGTTEWLTKSGTFFLRVPELRLKCTQRHKEIQKSRMIK

SEQ ID NO: 28697 - protein, 130 aa, Homo sapiens
LKSSGYLDLRGLEDKWLSQKPCYWKWLQPGFGPIPLPDGERLGVHLLSCHGWVLGEHGDSSVPVWSGVNVACVFLKILHPDLGTDTDKKQWKEVHKQVVENAYEVIKLKGYTSWAIGLCSRFGREYNEES

SEQ ID NO: 28698 - protein, 33 aa, Homo sapiens
LRNCESVREDVKYGLVPVIWACGSRVLIARLCR

SEQ ID NO: 28699 - protein, 36 aa, Homo sapiens
LRNCESVREDVKYGLVPVIWACGSRVLIARLCSFNF

SEQ ID NO: 28700 - protein, 50 aa, Homo sapiens
LVPNAAAEVFRDTFASPLEEPVTKRDVLSGVPSEQRNRLYKKHDASICFW

SEQ ID NO: 28701 - protein, 136 aa, Homo sapiens
LKKDTIQTIVIVPTGGPALQVSQICIQVSKHMGGVKVVMTTGGTNSGDDVLRLDDTVHMVIAAPGRILNLIKKGVAKVSHVQVIVLDEADKFLSQDFGQLMEDIILMLPEDRQILLHSATFPLSIQKFMNSHLQKP

SEQ ID NO: 28702 - protein, 189 aa, Homo sapiens
LTTQPPPQQQHHERPGAAAIGSARGQSTGKGPPQSPVFEGVYNNSRMLHFLTAVVGSTCDVKVKNGTTYEGIFKTLSSHFELAEDIVHQKASEPAAGPRREDTVDTMVFKPSDVMLVHFRNADFNYATKDKFTDSAIAMNSKGMGNTKRRCFSAGSGVTATATTTTSSPTCPMDGTPMKCSSSMKRTTV

SEQ ID NO: 28703 - protein, 229 aa, Homo sapiens
MVAKLEYESVLCVKPNISVYWIPPWASNCDYRASDWKLDQPDWTVHLRIISKGKTAYIKLEDKVSGELFTQIPVEQYPGIAVETVTDSSCYFLIWIQDGPGQSAVIDTAGFTDRGDAFEFNVSLQDHFKWVKQESEISKESQEMDACPNLDLGFKERQTIKLSTGNITTKNGCASKPRTAMGGGLSLLASPPGGQVSIPPLSSSVASAIMSPYQPFQNLTMEAVMQISF

SEQ ID NO: 28704 - protein, 38 aa, Homo sapiens
VRGGWHQHPSCCAPGVGSLGLPWSHPPPACPLVSLQGP

SEQ ID NO: 28705 - protein, 42 aa, Homo sapiens
LREGRRKGTAWGHWEARDPPPGRQGHSRAQARRLGEGARWEE

SEQ ID NO: 28706 - protein, 104 aa, Homo sapiens
VSVSANGSKLYDAVTMGAGSSITENLQSQIKRREGEITHLQLEIGNLEKTRSTMAEELVKLTNQNDELEQKVKEIPRLRIQLRDLDQRYNTIMQMYGEKAEEAE

SEQ ID NO: 28707 - protein, 220 aa, Homo sapiens
LSGLKSLQTVSGRQQLVKLVAEQADLEQTFNPSDPECVGRLLQCTQQAVPFFSKTVHSTRSVTYFCEQVLPNLGILTTAVEGLDIQLEVLKLLVEMSSFCGDMEKLETNLGKLFDKLLEYMPLPPEEAENGGNAGDEEPKLQFSYVECLLYSFHQLGQKLPDFLTAKLNAEKLKDFKIRLQYFARGLQVYIRQLHLALQVKQVRTEKNRKQKRTKLKLLH

SEQ ID NO: 28708 - protein, 33 aa, Homo sapiens
LGGSAARSVGACSRAVWRTKLHKRCLSNSQLSL

SEQ ID NO: 28709 - protein, 303 aa, Homo sapiens [sequence omitted]

SEQ ID NO: 28710 - protein, 98 aa, Homo sapiens
LSSKASYPQGPFHSRGQAKPLCLCLGLRPPAQPPRFPSASPCQSNLVPNAAAEVFRDTFASPLEEPVTKRDVLSGVPSEQRNRSKDPHSREHPAPYPE

SEQ ID NO: 28711 - protein, 68 aa, Homo sapiens
MEPEKQVMSRSSDECVVALCDQWLVSYSKKIPLVNLLTFDLKKNISICPLPGTWIMEKRIGRNRHLSA

SEQ ID NO: 28712 - protein, 56 aa, Homo sapiens
LVPHLGLCERPGAGSCLFPSFRQVCIQERGGQGQKDAGRLLISTEELISCETLTVI

SEQ ID NO: 28713 - protein, 178 aa, Homo sapiens [sequence omitted]

SEQ ID NO: 28714 - protein, 61 aa, Homo sapiens
VVWVMGLIVERKPCSFLRSIKVFRNCQGCWCGWTLMQPRLENTLLHSIGAHVTASFWSLWS

SEQ ID NO: 28715 - protein, 14 aa, Homo sapiens
MCHNDDSLFATLEC

SEQ ID NO: 28716 - protein, 33 aa, Homo sapiens
LRPRQPKERQSMERSGKEQGVGGPRMEPQLCQS

SEQ ID NO: 28717 - protein, 35 aa, Homo sapiens
MIRKAGSGCRAAGGPGGLIFNLSMPAAPFFPDQGL

SEQ ID NO: 28718 - protein, 81 aa, Homo sapiens
LRALRKPCECIGWGLEGSWAGAGQEQWVHFRQALLRSQAPAPAPWLGKPTLSVSMGAQAPGRVGWITSVLDLSQTGQPRAH

SEQ ID NO: 28719 - protein, 156 aa, Homo sapiens [sequence omitted]

SEQ ID NO: 28720 - protein, 232 aa, Homo sapiens
LSFRQHLPSAVCVRKPILSCLPGPRAAAVREPAFVAHGATTQSGARLLSGPGYWHFPGAHGASAPIFPMRPQPRGGSGRKENTGEEREGRAERYHAISADGERRLQPGTAVLTRHVSFLFGGREAEEHVMETDRVEGARDGDKRKEVCFVPIQGSFCFMRLTCARLVAALDIHGLSFSLRFCGSRDTKHEDITGREGQVTPLPRGTPQLCTARVGLSSPRTRGQGVPISCKT

SEQ ID NO: 28721 - protein, 216 aa, Homo sapiens
LGRGGRLARAALGVGGGVGAGGAMLGVLELLLLGAAWLAGPARGQNETEPIVLEGKCLVVCDSNPTSDPTGTALGISVRSGSAKVAFSAIRSTNHEPSEMSNRTMIIYFDQVLVNIGNNFDSERSTFIAPRKGIYSFNFHVVKVYNRQTIQVSLMLNGWPVISAFAGDQDVTREAASNGVLIQMEKGDRAYLKLERGNLMGGWKYSTFSGFLVFPL

SEQ ID NO: 28722 - protein, 26 aa, Homo sapiens
LHHCQNQLCPCLPKIPSEIHVDGIYI

SEQ ID NO: 28723 - protein, 46 aa, Homo sapiens
LRSTTCDGWRRERKAPFFPGPQRSPGPGRQETEARTVQRCRNVLGT

SEQ ID NO: 28724 - protein, 42 aa, Homo sapiens
VKQQVLMGKLQQVIQKILLRVCTDVETGTDVSITPLGQRPEQ

SEQ ID NO: 28725 - protein, 38 aa, Homo sapiens
LGKGGARGQNACSRTDLGTLHLPLLLQMIGYSSDLALP

SEQ ID NO: 28726 - protein, 77 aa, Homo sapiens
LQHVRIVTKSFINKGSFGEVEVWGKARKSVWSKQAKCGSCTGILLESGVGKELGRACGGTRSVSERACERIQNPREA

SEQ ID NO: 28727 - protein, 32 aa, Homo sapiens
MFHDDSTHGKFRGTVKAENGKLVINENTITIF

SEQ ID NO: 28728 - protein, 45 aa, Homo sapiens [sequence omitted]

SEQ ID NO: 28729 - protein, 91 aa, Homo sapiens
MCQWSPPNPDTPALFRKSPDIRGSMALSVDTMHSSSQGGKVLWKGIETWNNRPVLIRDRKDGTRGVTLLHPHILMCSLSIQNRSRPLSKHS

SEQ ID NO: 28730 - protein, 159 aa, Homo sapiens
LGSGALAAGMAGGLAGMGSIQNKETMQSLNNRLASYLDRMRSLETENWKLESKIRKHLEKKGPQIRHWSHYFKTIQDLRAQNLANTVDNARIVLQTDNACLAADDFRVKYETELTMCQSVESDIHGLRKVTDDTNVTWLQLETEIEALKEELLLMKKNH

SEQ ID NO: 28731 - protein, 61 aa, Homo sapiens
LTSFPNSTAKFPSRISPGAFLVAPLGLLRPEPRRGFMARAMDSLLWMKLRHSFHLFCILGF

SEQ ID NO: 28732 - protein, 97 aa, Homo sapiens
LQLAERVEISVYLDLCQLPLGLPMECKTPTLPGEASDARSIRRSAGLEIPGNTTMEGLAFGGGQSVAGWERQEWGLPLCWECRALPAHLPHASTRGR

SEQ ID NO: 28733 - protein, 73 aa, Homo sapiens
LQLAERVEISVYLDLCQLPLGLPMECKTPTLPGEASDARSIRRSAGLELTILPGAFSRGARVTLAHTAIMMVL

SEQ ID NO: 28734 - protein, 52 aa, Homo sapiens
LAERVEISVYLDLCQLPLGLPMECKTPTLPGEASDARSIRRSAGLEDFAGEQ

SEQ ID NO: 28735 - protein, 53 aa, Homo sapiens
LAERVEISVYLDLCQLPLGLPMECKTPTLPGEASDARSIRRSAGLENPVTPGI

SEQ ID NO: 28736 - protein, 51 aa, Homo sapiens
LDLMAPPRSNSAQQEDSFNPLRFHLCPNHSAASTCYLSTPTPSPKLPLKNP

SEQ ID NO: 28737 - protein, 108 aa, Homo sapiens
MVLKWQRFFVFVCFVSLEKEKERKIMQNRKHSDWTTGSYSDQSLPLLASYTIVIFMSKEAKTCNTIFSRQKKELSIKCINIFDLKIWMALGASRASILRMECLEKRDF

SEQ ID NO: 28738 - protein, 120 aa, Homo sapiens
LSGNLYLLYPQRLCFRLVSLSLSLPPSLPLSLSLSLSLSPHSTKAEGKYRQSDEMHRRSSCQIKAIFSDGKRNIFMIIIVGMFLYRIQKRILATIINVTSLGKENLNMPPLPFFTHRIME

SEQ ID NO: 28739 - protein, 36 aa, Homo sapiens
VAVGVGIVGNGGGREAFPLRLGWGGSVLLACREGGE

SEQ ID NO: 28740 - protein, 166 aa, Homo sapiens
LTAVLHSLNEVMENIEVYHEFWFEEATNLATKLDIQMKLPRTFRRAHQGNLESQLTSESYYKEILSVPTVEHIIQELKDIFSEQHLKALKCLSLVPSVMGQLKVNTLEEHHADLYSSDLPNPNMVSAELHCWRIKWKHRRKNIQLPSTIYEALHMPDIFFLMCMHC

SEQ ID NO: 28741 - protein, 82 aa, Homo sapiens
LPGSCSASQWNGTDLEACSRGVGSGEREPRVTDGGERKEGRLYFFKAPKSLMFTRPEMPRPRPGREKAEMEDRRLPYKLVGA

SEQ ID NO: 28742 - protein, 81 aa, Homo sapiens
VGSCSASQWNGTDLEACSRGVGSGEREPRVTDGGERKEGRLYFFKAPKSLMFTRPEMPRPRPGREKAEMEDRRLPYKLVGA

SEQ ID NO: 28743 - protein, 56 aa, Homo sapiens
LSLSKGLLLLTRPPFVCLTSFILDTGQELGTCRYGGAKIAVTQTGLKHAPCSPHCG

SEQ ID NO: 28744 - protein, 46 aa, Homo sapiens
MVGPSVVTTGAGSASPQGRGWSGLGKSIIVEAPTTTRPSRVESPYQ

SEQ ID NO: 28745 - protein, 58 aa, Homo sapiens
LRTELRRGLRSGTGTGGAAGASSPGGGGRGGRRRRDAGRPGAAAAGGCVAGGPGPRAE

SEQ ID NO: 28746 - protein, 103 aa, Homo sapiens
LSHLWGWSLSPGIWTLGAIDEAWLALLAAMCKTCVPGKAPLSLQRSSESHGRSQQSSKCRLGKSRGLCGGWEGLIHIPTRKFSRTPACHLDPLEGPGSGWTTS

SEQ ID NO: 28747 - protein, 67 aa, Homo sapiens
LAENMQQPLFSSCPSLMRAFEVTSAGHPGMSSMVTKCSGQTVWGKAPVLLSLPSCGCSMVPGSPTLT

SEQ ID NO: 28748 - protein, 297 aa, Homo sapiens
LPSHFEDMKKLTLERNPINACHVVKPSIFPVPFSIMKGLTLERNPMSVSNVGKPSDVPHTFEGMVGLTGEKPYECKECGKAFRSASHLQIHERTQTHIRIHSGERPYKCKTCGKGFYSPTSFQRHEKTHTAEKPYECKQCGKAFSSSSSFWYHERTHTGEKPYECKQCGKAFRSASILQMHAGTHPEEKPYECKQCGKAFRSAPHLRIHGRTHTGEKPYECKECGKAFRSAKNLRIHERTQTHVRMHSVERPYKCKICGKGFYSAKSFQIPEKSYTGEKPYECKQCGKAFISFTSFR

SEQ ID NO: 28749 - protein, 22 aa, Homo sapiens
LKTDAARSPQKPLGPSQMPSFG

SEQ ID NO: 28750 - protein, 95 aa, Homo sapiens
LEDTPRHLALAGGTGVGGVTWALGRLQARPSTWTRTLCREGPPPLLFRFPLVFFFLFLLRSFILFEQKSRTFSVEQNIHNRAVVIRIEQKKKKNT

SEQ ID NO: 28751 - protein, 180 aa, Homo sapiens
VEEQTELKCKFEQMKQDRITRYQGANVCVKNLDESIDDERLQKEFSPFGIINSANVMMEGGCSKRFGFVCFSSPEEVAKAVTAMNGKIVASKPLHVALAQCKEQRLAHFTNQYMQKMASVRAVPHPVINPYQPAPSTCYFVAAIPQTQNRAAYYPPGQIAQLRPSPPWAVQSVRPYPFQI

SEQ ID NO: 28752 - protein, 157 aa, Homo sapiens
LYSLPVLPTPLPSAPLSTGRGSSRSTPPGSPAPSLAAALLRRRFLLSLPGVEAELRHLPGGSGIPARCRGCRPSPLDRYPESERRGRDLAACWLSATHRERGQWRCRGGRGRSGRSGSQVCVYSGGRALPAPGLATDCAGMRGMHQGQSPHSPPRLP

SEQ ID NO: 28753 - protein, 66 aa, Homo sapiens
LKNSEKAGAGSGFPLSLHRHSDAARALPERPGGLFWRSQAQGCGSGWSKLFGGVQACPAQREVQRH

SEQ ID NO: 28754 - protein, 132 aa, Homo sapiens
LRTMGAGTVPVSVAVTGLHVVLSRVMVDSSREGPGVLGTLPGAVCGLSAGTRTEPAAVRLWSWTCRLSLGQIMNLILRKCGINIAWSSCLLLISALVCFRSRFIFYFYFFNLFFVTESRSVAQVGVQWRDLV

SEQ ID NO: 28755 - protein, 68 aa, Homo sapiens
VMARRNTRKHIPRPSHTTRPKRPSIRNNPIYYLRNFFLRRVFLSFLPLQLSPHPPTRRALTPNRHHPT

SEQ ID NO: 28756 - protein, 102 aa, Homo sapiens
VSVPKTQWIFCKKCGKHQPHKVTQYKKGKNCLYAQGKQPYDGKHSGYDGQTKRIFQKKAKTTKKTVLRLERVEPNCISKRMLAIKICEHFELGGDKKKRGAK

SEQ ID NO: 28757 - protein, 23 aa, Homo sapiens
LCAGWLRVEASPASHLPVSSEVA

SEQ ID NO: 28758 - protein, 96 aa, Homo sapiens
LLRGAGGRGHQRGVDTPRLNLGPLPALPWVRSRTAGTGNPRAPGEPRGGPRPAPETRGPLRTWLVPGASCARPLRPPCRRWSGSTSALRSAVVPRS

SEQ ID NO: 28759 - protein, 22 aa, Homo sapiens
MKKSCRWVFFLITKSLFKETVA

SEQ ID NO: 28760 - protein, 232 aa, Homo sapiens
LGLDPQGRPDPGPPRRAARTGPDSPRRPSAVRAALPACQAAAVPTSGPPRLFPHLVPRWRRGARASRACPRSGGVLGRAGPLPRVSTPRPPATGAGLGRARCGQVLVLISLPTPRSEEVPSPQTGRREGPGVLAEGVSFPAAQRRPARAGEGAAARAPSCNVGWGSPGPGRGPRGGTERGRAPGRLGAAPGGSQGAPAPSPAAPGRPRGAGVGAGRARQPGLEKAAGLGPAR

SEQ ID NO: 28761 - protein, 39 aa, Homo sapiens
VSGRNLVAWSPLFEMSYILEDHSCLQCRKPTIKGKQKCS

SEQ ID NO: 28762 - protein, 45 aa, Homo sapiens
VSGRNLVAWSPLFEMSYILELTILPGAFSRGARVTLAHTAIMMVL

SEQ ID NO: 28763 - protein, 62 aa, Homo sapiens
LVACLPNSAASPRQEHFLPRLLKLVRGFPTSQKSFIGPPLETSDRSHRRLASGICPHPRGQP

SEQ ID NO: 28764 - protein, 109 aa, Homo sapiens
VGHGPGALQVLGFPNLWGGRLGPRGREGLEYSDPAGAVCERESSWNSLAPPPPPLTGASSLFGNVASKKCLSQAITPSRETPRLGIYLKSGKNSGRILLHRYETEQNDF

SEQ ID NO: 28765 - protein, 79 aa, Homo sapiens
LWVLAVLGGNGHCCFSSSGQRRKIPGHLCRTDVSETLTRPPAQPWWLLVQDMEKGLLPRKPGGREDLENVQNTENWIRT

SEQ ID NO: 28766 - protein, 198 aa, Homo sapiens
LPPPQDGRWPEEPRPSSDGLPRHLPDKVSSTSSSSGPGPGGGAEPYPAAFVLWHNRSHVPLPGGAQQRPPPRPAPPRPAGASSSRRRGACALVPVSPLGATEGSRGSGRGGGGGGSGGAIRTRGSLPNPAVPAANCAWSDGCPRGGVATGVPPPMTAVCRKLTWSWEAGRRHVGFHLDKPQKDSSSEGLANLRPATSL

SEQ ID NO: 28767 - protein, 202 aa, Homo sapiens
LPPPQDGRWPEEPRPSSDGLPRHLPDKVSSTSSSSGPGPGGGAEPYPAAFVLWHNRSHVPLPGGAQQRPPPRPAPPRPAGASSSRRRGACALVPVSPLGATEGSRGSGRGGGGGGSGGAIRTRGSLPNPAVPAANCAWSDGCPRGGVATGVPPPMTAVCRKLTWSWEAGRRHVGFHLDKPQKDSSSEGLANLRPDPFLDTSC

SEQ ID NO: 28768 - protein, 197 aa, Homo sapiens
LPPPQDGRWPEEPRPSSDGLPRHLPDKVSSTSSSSGPGPGGGAEPYPAAFVLWHNRSHVPLPGGAQQRPPPRPAPPRPAGASSSRRRGACALVPVSPLGATEGSRGSGRGGGGGGSGGAIRTRGSLPNPAVPAANCAWSDGCPRGGVATGVPPPMTAVCRKLTWSWEAGRRHVGFHLDKPQKDSSSEGLANLRPGSC

SEQ ID NO: 28769 - protein, 126 aa, Homo sapiens
LVPVSPLGATEGSRGSGRGGGGGGSGGAIRTRGSLPNPAVPAANCAWSDGCPRGGVATGVPPPMTAVCRKLTWSWEAGRRHVGFHLDKPQKDSSSEGLANLRPDVCQLSEAGGAGIPSPVADERPG

SEQ ID NO: 28770 - protein, 146 aa, Homo sapiens
LVPVSPLGATEGSRGSGRGGGGGGSGGAIRTRGSLPNPAVPAANCAWSDGCPRGGVATGVPPPMTAVCRKLTWSWEAGRRHVGFHLDKPQKDSSSEGLANLRPVGVGLEVVAHEHPEENHHNHLQEQAEKHGDHWPPSEIRRNSQT

SEQ ID NO: 28771 - protein, 177 aa, Homo sapiens
LVPVSPLGATEGSRGSGRGGGGGGSGGAIRTRGSLPNPAVPAANCAWSDGCPRGGVATGVPPPMTAVCRKLTWSWEAGRRHVGFHLDKPQKDSSSEGLANLRPVGVGLEVVAHEHPEENHHNHLQEQAGERQPPAERNTGIIGLPVRSEGIPRPKSSSSTSSSSAIIICIIICPFFF

SEQ ID NO: 28772 - protein, 131 aa, Homo sapiens
VSPLGATEGSRGSGRGGGGGGSGGAIRTRGSLPNPAVPAANCAWSDGCPRGGVATGVPPPMTAVCRKLTWSWEAGRRHVGFHLDKPQKDSSSEGLANLRPDLQGPAAEMGHRPYQKRGWPATQKPLGTPWG

SEQ ID NO: 28773 - protein, 122 aa, Homo sapiens
VSPLGATEGSRGSGRGGGGGGSGGAIRTRGSLPNPAVPAANCAWSDGCPRGGVATGVPPPMTAVCRKLTWSWEAGRRHVGFHLDKPQKDSSSEGLANLRPVPGTIEKHVPLEILQRKIGNQG

SEQ ID NO: 28774 - protein, 97 aa, Homo sapiens
LREGERERRRERDGGRARQSEQRNLTEQVVRRRLLLLSALRYPGDPRRDSASERLRTPVQRSLARRIAESSPLFTTWSRFILPYPVFGFLSSPSSLC

SEQ ID NO: 28775 - protein, 190 aa, Homo sapiens
MLTYILSFLPLSDQKEASLVSWAWYRAAQNALRETDVRYNIPVSSASLSAIKSLGLRGICCISLTNLDGSLASHQVLQSVAYHLGPHLQSLSLGGGSPTEASSVALILGCPALCVLDLSGCNSLFTSGTLLAQPEMAQSVQQALSGLRELNLAGLRDLADLSFNQLSSCAPSLERLSLAYCHLTFELGPA

SEQ ID NO: 28776 - protein, 27 aa, Homo sapiens
MVGSLVLSAPFPILWGGEQSWSSIMPA

SEQ ID NO: 28777 - protein, 44 aa, Homo sapiens
LEHSLPFGALADANPACVLAEVEGGSSSPRSSLVWFSYSRDICC

SEQ ID NO: 28778 - protein, 44 aa, Homo sapiens
MPSRVLVGNQDGTAVLLAGEAYYWFLLLQPHWWLCRFIEVAYNC

SEQ ID NO: 28779 - protein, 46 aa, Homo sapiens
MPSRVLVGNQDGTAVLLAGEAYYWFLLLQPHWWLCSRLTRSTSITS

SEQ ID NO: 28780 - protein, 59 aa, Homo sapiens
LTQDLEGTLGRPRSAHEGLAYHTLLPIPSEPLFAAPGEHLHQCFVKESYCPPRVLAKEQ

SEQ ID NO: 28781 - protein, 244 aa, Homo sapiens
LLFRQLGITNVLSLVCATLMEHEVLFLSRSYQQLTDACRSLLALLFPLRYSFTYVPILPAQLLEALSTPTPFIIGVNAAFQAETQELLDVIVADLDGETVTIPECVHIPPLLEPLQSQTHSVLRMVLDPELELVDLAFPPPMTSPSSLNMQDKELRLFHQLLQGYLWCLHVVCIHPEPVIRFHKAAFLGQCGLVEDDFLMNVLEGMAFALFVLECGVPYCPTDLFDELVAHDVAQRWVDENHPQ

SEQ ID NO: 28782 - protein, 184 aa, Homo sapiens
LSDARAASPAATPRSALGLERPPPQLLTLGSPSPRGTGARLGEPRAWCDGAVRSALRRPQTPATRRLRALQNVAADPAPPGLQQQSPPPPGSSSQLLCLSGTRRRLRVPRIPGSRPPPSSRLRDSSSGLRDPLGSSHCTRAPQTQAPAVVSALPGIQLSRQYPRGQRHRPHPARSEPGRASAWR

SEQ ID NO: 28783 - protein, 46 aa, Homo sapiens
VFWEELRRQGCGCWLLPGQPEAIDRYLRFGAVSGRGRDIQRSFRMR

SEQ ID NO: 28784 - protein, 69 aa, Homo sapiens
VLVDPTGGLAWKKARGCDGSSLSWEIPGDGGEPLGTCSICGVGFFRCWWIPQDVHCGTSTDFHTKVISF

SEQ ID NO: 28785 - protein, 765 aa, Homo sapiens
LGTPGGGLAVPPRAIDLDAPDGLHHVVCGLHRGPGQRVFLIPCILIALVGGIPIFFLEISLGQFMKAGSINVWNICPLFKGLGYASMVIVFYCNTYYIMVLAWGFYYLVKSFTTTLPWATCGHTWNTPDCVEIFHHEDCASASLANLTCDQLADRQSPVIEFWENKVLRLSGGLEVPGALNWEIVYFTATFPYVVLVVLLVLGVLLPGALDSIIYYLKPDWSKLGSPQVWIDVGTQIFFSYAIGLGALTALGSYNRFNNNCYNGTSFFAGFVVFSILGFMAAEQGMHISKVAESGPGLAFIAYPQAVTLMPVAPLWAALFFFMLLLLGLDNQICMGLWDREPGEGRSVEGFITGLLNLLPASYYFCFQREISVALCCALRFVIDLSMVTDGGMYVFQLFDYYSASGTTLLWQAFWECVVVAWVYGADRFTDDIACMIGYRPCPWMKWCWSFFTPLGIFIFNVVYYEPLVYNNTNVYPWWGEAMGWAFVLSSMLCMPLHLLGCLLRAKGTMAECWKHLTQPIWGLHHLEYRAQDADVRGLTTLTPVSESSKVVVVESVMGQLSSHHQLTSGLWGKRLQYSILGVWAANLACSGFPPCALGWAQPQEGTPDTAPTSRLKADALPAPPVFCVAALTHTPGMAEALQGGSTVLRVGTAFLMCYWRAAQCRGLGTGARQEASVLAWLAVGLEDTALREPREGRPGASTSTALWWQAHTQHVLRAKGPSPFLPSSALGQLQVTAKDKSPLPAGISQRSSCKPSGGGGAGSD

SEQ ID NO: 28786 - protein, 159 aa, Homo sapiens
LGPRTRRPPPPGSRAVEVPDEATIFPAPPPSPAPLPGPPLSLSLPPKPLPLRRTGASREERGLCLETRDARGAPASGGPPGLGTPRLGGVRASFPRFFPPRLVPFPPAPSADLSRRPLPSHRPTQDPGLVTGQCDASRLPRGQRGTHRAWAAPEATRPG

SEQ ID NO: 28787 - protein, 166 aa, Homo sapiens [sequence omitted]

SEQ ID NO: 28788 - protein, 116 aa, Homo sapiens
VHRQVPSCQQLLQKPMFFFSPILRHSQNWSERGVKWDTSFKVGKPKKGASTSSLCSFSPAFFGRIRGTGAALGKVCPTRVSQLVARRGGGEGGSSSEPVTARMIEPASRLPRSPRT

SEQ ID NO: 28789 - protein, 54 aa, Homo sapiens
VRVAVCPLIEARLSWKFQSCNDFCKWSFSVCLEISEYCVLGLICDDLIPNLNFC

SEQ ID NO: 28790 - protein, 54 aa, Homo sapiens
MRVAVCPLIEARLSWKFQSCNDFCKWSFSVCLEISEYCVLGLICDDLIPNLNFC

SEQ ID NO: 28791 - protein, 76 aa, Homo sapiens
LSCNHTVLDPDLRMTFCKALILLRNKNLINPSSLLELFFELLCCHDKLLQKTSYTYIVTDIKNINAKHKNKVDVVL

SEQ ID NO: 28792 - protein, 163 aa, Homo sapiens
LRAAACVQQRPTAACGGSRASGPRLHRGAPRRAEAVRPAEAPPRPAQKTPRSLALILSALHFCQLKVQNMRGRYEASQDLLGTLRKQLSDSESERRALEEHLRGAGEEQPGPQPAGGPAAGRGAAAGAGEAAGCPGGAAAPAGPAGGRAGRGGAEWRTGSPGA

SEQ ID NO: 28793 - protein, 128 aa, Homo sapiens
LTLRAAACVQQRPTAACGGSRASGPRLHRGAPRRAEAVRPAEAPPRPAQKTPRSLALILSALHFCQLKVQGEEQPGPQPAGGPAAGRGAAAGAGEAAGCPGGAAAPAGPAGGRAGRGGAEWRTGSPGA

SEQ ID NO: 28794 - protein, 28 aa, Homo sapiens
MYWLSHILKFNGLVVIRIKEAFDVRPRH

SEQ ID NO: 28795 - protein, 345 aa, Homo sapiens [sequence omitted]

SEQ ID NO: 28796 - protein, 195 aa, Homo sapiens
LIVAAGIGEFEASISKNGQIQEHALLAYTLGVKQQILGVSKIDSTEPLYSQKRYKEIVKEISTFLKKIGYNLDTVAFVSISGWNGGSMLKPSAHRPWFKGWKVVRKDGNASGTTLPEALDCVLSLTCPTVRPLHLPLQDVYRLGGTDTIFVGRVGGTDTIFVGRAKPGFLKPGMVVTFAPVNIATKDVLKCTMKL

SEQ ID NO: 28797 - protein, 181 aa, Homo sapiens [sequence omitted]

SEQ ID NO: 28798 - protein, 90 aa, Homo sapiens
LGAPARAALAHLAASPQGARTQTCPCHLSARVRAGGGGATKGGAESGAQDSAGAPAHRGAHRPSEKLKTREGEWFTQFGTTDPNLALHED

SEQ ID NO: 28799 - protein, 73 aa, Homo sapiens
LVFRLSPRCIRDLWTGQDSEATPPAHSPGPTNPACPQPSHLPLPGPSHRPPPLGRRAWCERPSAEAGIMGAVP

SEQ ID NO: 28800 - protein, 161 aa, Homo sapiens
LAPTGAPLAIPQAIRRHENRHPETRRPALPPRLQGPGQAQQPLPPLCASAPTGLWRGLTRPRCGPPGLRTPPPARPAAPGEGGRKISCLSGWISTSLDSLPNFCGPASADSWGRRGKGGNPQIHPGTGSGGWGWWEPDLLERTDSESEPTCPGAQRPRGSR

SEQ ID NO: 28801 - protein, 57 aa, Homo sapiens
VMMVQSASVSKAGKGSSSSHGVAAALNQDLDPDPKCHVFNVSSQRCQMGSAQPCLCC

SEQ ID NO: 28802 - protein, 62 aa, Homo sapiens
VLTYKPAMVQSASVSKAGKGSSSSHGVAAALNQDLDPDPKCHVFNVSSQRCQMGSAQPCLCC

SEQ ID NO: 28803 - protein, 20 aa, Homo sapiens
LVSQETVRLQFSSSSGIMAH

SEQ ID NO: 28804 - protein, 32 aa, Homo sapiens
VRRRALPGLVAPTWEKETPRHRKPRFSRRKNR

SEQ ID NO: 28805 - protein, 71 aa, Homo sapiens
LGCLNGFGMEQGREWLRLPPRFGDAVRAASGALETSESLRVGWDSGPASHLPADWSAPRASVTQPASKTSL

SEQ ID NO: 28806 - protein, 203 aa, Homo sapiens [sequence omitted]

SEQ ID NO: 28807 - protein, 106 aa, Homo sapiens [sequence omitted]

SEQ ID NO: 28808 - protein, 143 aa, Homo sapiens
LLPLLSRPPGLTLSPGRNGVVEPPQPQAAPSSWPRGSLGDSVQYSPRGLCCAKAAPADAAAPVDGALPWEQSWNSSKRIKDNCVGRLPRFVAVPPQTSEMNTALETRRIQVAEAFRSRNQENINCLKYQSSLRSLHVPQESSS

SEQ ID NO: 28809 - protein, 142 aa, Homo sapiens
LLPLLSRPPGLTLSPGRNGVVEPPQPQAAPSSWPRGSLGDSVQYSPRGLCCAKAAPADAAAPVDGALPWEQSWNSSKRIKDNCVGRLPRFVAVPPQTSEMNTALETRRIQVAEAFSRNQENINCLKYQSSLRSLHVPQESSS

SEQ ID NO: 28810 - protein, 360 aa, Homo sapiens [sequence omitted]

SEQ ID NO: 28811 - protein, 27 aa, Homo sapiens
LLYEGQNRYLLSKAVVRRGPNPPLFPP

SEQ ID NO: 28812 - protein, 54 aa, Homo sapiens
LSAMLSSKHKFIRTISAGIYSLPHYDVNLLNCLFFKKKKNQGNTIRILCVKTQK

SEQ ID NO: 28813 - protein, 32 aa, Homo sapiens
LRRTLYVLPSACRSSLLSDQHHASPGDKPSAL

SEQ ID NO: 28814 - protein, 25 aa, Homo sapiens
LADLEQKIEVHFMPPFESLALSPRL

SEQ ID NO: 28815 - protein, 20 aa, Homo sapiens
MTDLVYRDPGVLKQVVMMDR

SEQ ID NO: 28816 - protein, 61 aa, Homo sapiens
MNSQMPLRVSFFCGLCRMAMVMSAMYECGQILQDLTSKKTGGGAGGGGEDVWPMHAECKAA

SEQ ID NO: 28817 - protein, 7 aa, Homo sapiens
KPLAHRH

SEQ ID NO: 28818 - protein, 13 aa, Homo sapiens
VEQVLKKQRTQNS

SEQ ID NO: 28819 - protein, 70 aa, Homo sapiens
MPKVTEDPATISCSPWKPLDSSVMSPVIQQPWPSFDGLNIWSSLNSLYIGNLPASIHIPTSVCIPRITGR

SEQ ID NO: 28820 - protein, 25 aa, Homo sapiens
MWHRGEQEMLRETVHRYICTSQGTI

SEQ ID NO: 28821 - protein, 32 aa, Homo sapiens
KKVTRLRGAGAAGISGSEASEGRRGAGAWATG

SEQ ID NO: 28822 - protein, 42 aa, Homo sapiens
RDEYTSEDRARLISMGQKVLAGTVLFKSAYLLAGVFVWEEVG

SEQ ID NO: 28823 - protein, 52 aa, Homo sapiens
MTDTENHDSSPSSTSTCCPPITAGMQLKDSLGPGSNCPLWTLRPLHLRVVCL

SEQ ID NO: 28824 - protein, 12 aa, Homo sapiens
MYGPMYLRHLLM

SEQ ID NO: 28825 - protein, 12 aa, Homo sapiens
KEGAKTKNVGSL

SEQ ID NO: 28826 - protein, 13 aa, Homo sapiens
IMHCFTRGNGPFF

SEQ ID NO: 28827 - protein, 23 aa, Homo sapiens
KKFLGKAGHQVLSKILDCEARHW

SEQ ID NO: 28828 - protein, 72 aa, Homo sapiens
TCPCSATGARAVTMLVATGQCSRCFMFTFSTFSFNCHNSEVDSVRDRLPQDHSAPANSMQLTLTLNTLQLHS

SEQ ID NO: 28829 - protein, 27 aa, Homo sapiens
MGEHLAMTWCPLKAKLAKKKKRTWRQI

SEQ ID NO: 28830 - protein, 91 aa, Homo sapiens
RRRLQGAETAPLPSSLGKKSETPSQKKKNMAETRKLRDGATAPLLPACVRKVSLRGAPAPASGGEGGTCRGRSSEALGPLCSPAIARAALT

SEQ ID NO: 28831 - protein, 16 aa, Homo sapiens
RRPTRRRLCCSHVYCV

SEQ ID NO: 28832 - protein, 11 aa, Homo sapiens
RCQASPKSAAG

SEQ ID NO: 28833 - protein, 14 aa, Homo sapiens
IHRHPGPHVLPDHS

SEQ ID NO: 28834 - protein, 20 aa, Homo sapiens
ILGPTCCLTIPEPRWEPWLR

SEQ ID NO: 28835 - protein, 27 aa, Homo sapiens
VRQSGGKPCLAVVDSCSWGVRSRSSPA

SEQ ID NO: 28836 - protein, 31 aa, Homo sapiens
MSCNTHREDLQLHSRASETTNPPEGRNSEHI

SEQ ID NO: 28837 - protein, 15 aa, Homo sapiens
VPSAAIRPLYPPIPR

SEQ ID NO: 28838 - protein, 19 aa, Homo sapiens
MSLFLSRATGEGGRSAKSR

SEQ ID NO: 28839 - protein, 14 aa, Homo sapiens
LEMTRAWGVGILVI

SEQ ID NO: 28840 - protein, 13 aa, Homo sapiens
VLSRMVLCFHSFG

SEQ ID NO: 28841 - protein, 31 aa, Homo sapiens
LAFLLLNLQMACCGTSPCDHVHEGNTHPSQG

SEQ ID NO: 28842 - protein, 10 aa, Homo sapiens
IFNKPAFSPG

SEQ ID NO: 28843 - protein, 32 aa, Homo sapiens
MWLRIISLAPKVKIRGSSSYFSRRVGWALWHE

SEQ ID NO: 28844 - protein, 18 aa, Homo sapiens
LLRGQAELEETADKFFSL

SEQ ID NO: 28845 - protein, 7 aa, Homo sapiens
IEINTTT

SEQ ID NO: 28846 - protein, 12 aa, Homo sapiens
KSSMRKEKIKGF

SEQ ID NO: 28847 - protein, 11 aa, Homo sapiens
KVKLEKMRVFT

SEQ ID NO: 28848 - protein, 15 aa, Homo sapiens
LAKIKCSICSYQFNI

SEQ ID NO: 28849 - protein, 10 aa, Homo sapiens
LSLDKIEKNS

SEQ ID NO: 28850 - protein, 9 aa, Homo sapiens
MSPQCKDKD

SEQ ID NO: 28851 - protein, 95 aa, Homo sapiens
VETMERGRVELGSPCLVGERELTYPQQQLRDDDVGELGRQVEWGAQLWVLYAGVERPVSRMGQKQENGSHVLGLHGGPQLAAQRLLRGAQRRQEQ

SEQ ID NO: 28852 - protein, 11 aa, Homo sapiens
VWPSGSSLSLL

SEQ ID NO: 28853 - protein, 24 aa, Homo sapiens
LSTASSLRPLVMMRPFFVWHLQRR

SEQ ID NO: 28854 - protein, 44 aa, Homo sapiens
LSTASSLRPLVMMIKGGGCGLENSHVKTHHLKVLSVRIFMMKFL

SEQ ID NO: 28855 - protein, 53 aa, Homo sapiens
LSTASSLRPLVMMVQSASVSKAGKGSSSSHGVAAALNQDLDPDPKCHVFNVSK

SEQ ID NO: 28856 - protein, 68 aa, Homo sapiens
RTWTRTQSAMSLMLAPSDARWDQHSPASAANCSSKVIAMRSLGFIFKGMKQLRLFWKTFWQLVKLEYN

SEQ ID NO: 28857 - protein, 40 aa, Homo sapiens
LCLSLPSNWDYRCTLPHLADFFCFSRDRVSTMLPRLVSNS

SEQ ID NO: 28858 - protein, 8 aa, Homo sapiens
ILLPQTPE

SEQ ID NO: 28859 - protein, 132 aa, Homo sapiens
TIRLQRFPAWQRGFPGGDLWLALAMRGEERRGAASRLGDVPARVGGMRSLGPPGARSLPASRAHPWGREGGRLRTPARDLRESGAQRTGSGCSLALDGKWGIGWGAADPLTWITWCVSAGLRRPTTSSPSVD

SEQ ID NO: 28860 - protein, 11 aa, Homo sapiens
ISPISNRISSA

SEQ ID NO: 28861 - protein, 47 aa, Homo sapiens
RAGKRREHPGTRARARIWWRQPWRLHECRCWVWKLWVRRQLGDSRLQ

SEQ ID NO: 28862 - protein, 27 aa, Homo sapiens
RLHECRCWVWKLWVRRQLGDSRLQLQW

SEQ ID NO: 28863 - protein, 148 aa, Homo sapiens
LGRAGGHTAWLSCSWSPASPRRPGGSISQEARSPPGGWAQPRQMDEKTKKAEEMALSLTRAVAGGDEQVAMKCAIWLAEQRVPLSVQLKPEVSPTQDIRFLMVQNGHSSSIQPSHHRRKGRKTPLHTLLKSIAQKLYTLLPLIPVDQN

SEQ ID NO: 28864 - protein, 12 aa, Homo sapiens
LQSGFIRYCPAR

SEQ ID NO: 28865 - protein, 47 aa, Homo sapiens
VASVLRRPSPSFAIARHRTPSLEICRHLDFSHAVCQVSAATRRQGAG

SEQ ID NO: 28866 - protein, 30 aa, Homo sapiens
LSLVQCLVLFAGVSPPGFACPRERHWRSVT

SEQ ID NO: 28867 - protein, 38 aa, Homo sapiens
VSPPGFACPRERHWQALWAVLHLGRLRTSQRPLSPAAL

SEQ ID NO: 28868 - protein, 31 aa, Homo sapiens
LRSQDCQLTSVLCAQWPQVTCLQEEAELRCL

SEQ ID NO: 28869 - protein, 29 aa, Homo sapiens
LPRLECSGMISAHCKLCFLGSRHSPASAS

SEQ ID NO: 28870 - protein, 16 aa, Homo sapiens
MDDSRSGRGSHVHCMS

SEQ ID NO: 28871 - protein, 9 aa, Homo sapiens
MAAEGLAAV

SEQ ID NO: 28872 - protein, 41 aa, Homo sapiens
LEAPLEPAWLASPAEEPLGPHLPPRPLPVPGPSAAWRAGRR

SEQ ID NO: 28873 - protein, 9 aa, Homo sapiens
MLVRLVLNS

SEQ ID NO: 28874 - protein, 42 aa, Homo sapiens
TPSPHTSFKSRPVLQKVCCFCTKGFGIWHLARNAHSFTSFIL

SEQ ID NO: 28875 - protein, 18 aa, Homo sapiens
IISHRKPSFYSFAIFSRQ

SEQ ID NO: 28876 - protein, 18 aa, Homo sapiens
LLLARTRRVFPPTASRWW

SEQ ID NO: 28877 - protein, 11 aa, Homo sapiens
IGTAWAVGPTG

SEQ ID NO: 28878 - protein, 9 aa, Homo sapiens
VCSTSQTAL

SEQ ID NO: 28879 - protein, 19 aa, Homo sapiens
MICNRTCSYFWKLQSWKGS

SEQ ID NO: 28880 - protein, 21 aa, Homo sapiens
IGTQALDRKLEVEMVSETVSK

SEQ ID NO: 28881 - protein, 16 aa, Homo sapiens
MVLLLVTFLSMDDLLG

SEQ ID NO: 28882 - protein, 31 aa, Homo sapiens
MTCLGKDMKTVPVIPFKGMESRLDYTVWSKF

SEQ ID NO: 28883 - protein, 15 aa, Homo sapiens
MIEEMQVSLNFEGNF

SEQ ID NO: 28884 - protein, 9 aa, Homo sapiens
IFKQADLLS

SEQ ID NO: 28885 - protein, 51 aa, Homo sapiens
MAPVCDVPRNLALRKKQSKPGKYVALNRSNQGQKGRKRVSYLHGTTLTSSA

SEQ ID NO: 28886 - protein, 45 aa, Homo sapiens
TQKFLFRSSRYTPRLASSAQGTSLLENRANTEKMDPGDEDGETGC

SEQ ID NO: 28887 - protein, 11 aa, Homo sapiens
LPLILRCRVFI

SEQ ID NO: 28888 - protein, 27 aa, Homo sapiens
LGGSAARSVGACSRAVWRTKLHKRCLR

SEQ ID NO: 28889 - protein, 31 aa, Homo sapiens
MRSARLRDRLGRSRAEARLPADGQGFGNSPV

SEQ ID NO: 28890 - protein, 25 aa, Homo sapiens
TGEERDRKHNWMCKPVVLQEVNTWN

SEQ ID NO: 28891 - protein, 10 aa, Homo sapiens
MTHLIEYDRH

SEQ ID NO: 28892 - protein, 26 aa, Homo sapiens
LLLLTLWVRTAFVSCNTHGEGLQVHF

SEQ ID NO: 28893 - protein, 47 aa, Homo sapiens
TEKVCRFISEPARPPARQEEDAAEHQKEQTPNTPPLRTVTPGGSAAS

SEQ ID NO: 28894 - protein, 27 aa, Homo sapiens
LSQRDHQPARRKTLPNIRRNKLQTRRL

SEQ ID NO: 28895 - protein, 30 aa, Homo sapiens
RVRGFMKSQRPRTHQFRTQMHHCTPAWVTE

SEQ ID NO: 28896 - protein, 9 aa, Homo sapiens
LAVPTHHSL

SEQ ID NO: 28897 - protein, 29 aa, Homo sapiens
LWEEEKRGWGHSTNGVYATEVLLKWKGSA

SEQ ID NO: 28898 - protein, 235 aa, Homo sapiens
TRDRLPGRLSRGRGAGGMALVPYEETTEFGLQKFHKPLATFSFANHTIQIRQDWRHLGVAAVVWDAAIVLSTYLEMGAVELRGRSAVELGAGTGLVGIVAALLGAHVTITDRKVALEFLKSNVQANLPPHIQTKTVVKELTWGQNLGSFSPGEFDLILGADIIYLEETFTDLLQTLEHLCSNHSVILLACRIRYERDNNFLAMLERQFTVRKVHYDPEKDVHIYEAQKRNQKEDL

SEQ ID NO: 28899 - protein, 30 aa, Homo sapiens
MSFHPKGSTPIWQLTSPQAHPMDSMPHQVT

SEQ ID NO: 28900 - protein, 7 aa, Homo sapiens
MELHILF

SEQ ID NO: 28901 - protein, 28 aa, Homo sapiens
MDNTEPSQKPLWPPPGRPGCRGPLPGQP

SEQ ID NO: 28902 - protein, 57 aa, Homo sapiens
IASPRARGQRRMHGNTNSPSPPGHTDCPTSNRLHLVLEQSEFGICQRKLLSGKMEDS

SEQ ID NO: 28903 - protein, 15 aa, Homo sapiens
MPEKTSIRQDGRLLG

SEQ ID NO: 28904 - protein, 12 aa, Homo sapiens
IPLQQSRTEQIE

SEQ ID NO: 28905 - protein, 32 aa, Homo sapiens
KEPRTLKLIVPMKSAVPQMSCTTPIWTHLAAL

SEQ ID NO: 28906 - protein, 11 aa, Homo sapiens
MFKTTEHLHRL

SEQ ID NO: 28907 - protein, 9 aa, Homo sapiens
RLTTTGTSH

SEQ ID NO: 28908 - protein, 12 aa, Homo sapiens
IEAGMSCCWYFN

SEQ ID NO: 28909 - protein, 9 aa, Homo sapiens
IEAGMSCCW

SEQ ID NO: 28910 - protein, 21 aa, Homo sapiens
LAPSPRPRRAGLRGQGPSGEG

SEQ ID NO: 28911 - protein, 17 aa, Homo sapiens
IFFCPVIAFILNYKKEV

SEQ ID NO: 28912 - protein, 47 aa, Homo sapiens
LGGLGDRRARAARSSWASAAHSGQPLLKTPFPSPFSAPSGRQSGSDQ

SEQ ID NO: 28913 - protein, 16 aa, Homo sapiens
LRCALAKKKKRTWRQI

SEQ ID NO: 28914 - protein, 68 aa, Homo sapiens
MGWASYQEPRMLRCPPKWIASYLVPACCRLLHLVPLGTHCAANSSRQIHWEAVAHEGISETFFCDLAV

SEQ ID NO: 28915 - protein, 243 aa, Homo sapiens
MLLSLLGACAVVGPFHGPEWEPVQGLLSQNHSCRDPQCCGNLLVLCLFLVWQVRHCWHQVTRTRFSTRNVIKVPLQKRAVPSMRCETVFKLTPEFFSPGKSRGLDSQQCAQRQRWGYRRSLQESWAQNLLSPQHPCPGPPSGVHTHSEPIFCTTSISNTCLLPQNSSWKAWQVPWCLHDGQTRPALDMCQEMEQLLLHSQERLVSLEPVISVRSRPTSMTLTTSLPNLLSAERLQFCPQRAPA

SEQ ID NO: 28916 - protein, 31 aa, Homo sapiens
LSLPRPAAPSPASALSLRQSLSIKPGAKRGS

SEQ ID NO: 28917 - protein, 20 aa, Homo sapiens
RKPAVLEARGPQRPALHLLP

SEQ ID NO: 28918 - protein, 13 aa, Homo sapiens
IHHGDWHFHFHLC

SEQ ID NO: 28919 - protein, 17 aa, Homo sapiens
ITLQLRTPTAEAALGRG

SEQ ID NO: 28920 - protein, 23 aa, Homo sapiens
LRARENHVHQTLGEEKWERGEKT

SEQ ID NO: 28921 - protein, 11 aa, Homo sapiens
TISVSGVFLFA

SEQ ID NO: 28922 - protein, 53 aa, Homo sapiens
LPGTSDPSGPSCVDYHCFSLRLSYVLEEGFADPRRPSGSNCHLDAGDAELPTG

SEQ ID NO: 28923 - protein, 21 aa, Homo sapiens
LPPAMMWRKTTAVSNLVSRAW

SEQ ID NO: 28924 - protein, 82 aa, Homo sapiens
IGCAKCAALFPLDLLCVCVRERQRERRRRRGRRRRRRRRRRRRRRRRRRTRRRRGRGRGRGREEQRKREREGERETCYVTQT

SEQ ID NO: 28925 - protein, 17 aa, Homo sapiens
RNVKGKHLKHQKILDCS

SEQ ID NO: 28926 - protein, 16 aa, Homo sapiens
IYRDKRQKQEVRSKDD

SEQ ID NO: 28927 - protein, 34 aa, Homo sapiens
RSNLICYGKAPHFQIHAGPSADCWQKKGSHQTHA

SEQ ID NO: 28928 - protein, 12 aa, Homo sapiens
RSLLESHVQAVL

SEQ ID NO: 28929 - protein, 21 aa, Homo sapiens
RSLLESHVQAVFVHETGRRPC

SEQ ID NO: 28930 - protein, 11 aa, Homo sapiens
LTQSCGHSESF

SEQ ID NO: 28931 - protein, 38 aa, Homo sapiens
VELSTGFIRRKTFPEAAEGQIQNPCLGETSWPGLHYLR

SEQ ID NO: 28932 - protein, 10 aa, Homo sapiens
LLLVDMRRTE

SEQ ID NO: 28933 - protein, 146 aa, Homo sapiens
TGVFPASGARRGARCGRTVRGGGRGGRSAGCRREEALHQGPRRHSFNHIRASAGNACWRLSPVPSILKGKKALPTHSPAPRSWSRRSRAHGVQPVADPVPRAVGEMDVVCGTRRGRRRGRGWRARGRPRGGGFASRDQILEFQLGF

SEQ ID NO: 28934 - protein, 146 aa, Homo sapiens
TGVFPASGARRGARCGRTVRGGGRGGRSAGCRREEALHQGPRRHSFNHIRASAGNACWRLSPVPSILKGKKALPTHSPAPRSWSRRSRAHGVQPVADPVPRAVGEMDVVCGTRRGRRRGRGWRARGRPRGGGFASRDQILEFQEWL

SEQ ID NO: 28935 - protein, 31 aa, Homo sapiens
RCMKVIITDVFQKLVEGCEKTTRITRHVLSI

SEQ ID NO: 28936 - protein, 47 aa, Homo sapiens
RCMKVIITDVFQKLVEGCEKTTRITRHVLRCGMQHFGRKIEDVFKKT

SEQ ID NO: 28937 - protein, 11 aa, Homo sapiens
KEPRDETSLGS

SEQ ID NO: 28938 - protein, 22 aa, Homo sapiens
VPSPRETELLEFFQQGTASMWI

SEQ ID NO: 28939 - protein, 15 aa, Homo sapiens
LRKEPDYKDIYLLLP

SEQ ID NO: 28940 - protein, 34 aa, Homo sapiens
RSPITRIFTCSYPDLGTRMGRPPVAMSPPRCSWG

SEQ ID NO: 28941 - protein, 63 aa, Homo sapiens
VVGRGRRMPGNRRDAVRKATGCRSWKGTPGFPPSEPGWEVTSMRLNFSWIEREARSSACQQPP

SEQ ID NO: 28942 - protein, 40 aa, Homo sapiens
VVGRGRRMPGNRRDAVRKATGCRSWKGPTAVHEGGMDSEL

SEQ ID NO: 28943 - protein, 28 aa, Homo sapiens
LPSTTQCLRGFVCGSPCYISWFPDWETR

SEQ ID NO: 28944 - protein, 19 aa, Homo sapiens
LSAAHPATFLGSLTGKRGD

SEQ ID NO: 28945 - protein, 33 aa, Homo sapiens
LGNEVTDGWPRQPLRRLRPALWSIREGNSGQPE

SEQ ID NO: 28946 - protein, 23 aa, Homo sapiens
RNWHLESGHLQLGPTTETTLKHQ

SEQ ID NO: 28947 - protein, 18 aa, Homo sapiens
LVHAWPKHEETHRGNNFP

SEQ ID NO: 28948 - protein, 36 aa, Homo sapiens
MRKLIAGIIFLKIWTCTVRTSTDLMLSCLISGQVAV

SEQ ID NO: 28949 - protein, 17 aa, Homo sapiens
LSKGEVAALCSVSWPRR

SEQ ID NO: 28950 - protein, 16 aa, Homo sapiens
RRSLRKPQISFFLFER

SEQ ID NO: 28951 - protein, 11 aa, Homo sapiens
RLLRYCLALSF

SEQ ID NO: 28952 - protein, 10 aa, Homo sapiens
IERKDYRAPN

SEQ ID NO: 28953 - protein, 26 aa, Homo sapiens
KFEVENWKTEVREGEEKNREDREIRR

SEQ ID NO: 28954 - protein, 8 aa, Homo sapiens
VQKLEGKA

SEQ ID NO: 28955 - protein, 8 aa, Homo sapiens
LKLEGEVG

SEQ ID NO: 28956 - protein, 12 aa, Homo sapiens
KNLEGLKYSSLV

SEQ ID NO: 28957 - protein, 67 aa, Homo sapiens
RCYTEVDSVNLGRQQQTGFQEPVFDEARTEEQASKQQFVVKIGKESRSQCDLVKEARKKEGALTIWW

SEQ ID NO: 28958 - protein, 9 aa, Homo sapiens
TEEASRRCA

SEQ ID NO: 28959 - protein, 42 aa, Homo sapiens
LGSSGLRRLCCVPMFRLPQTGISSLSEELLHFIWEQKTAGSC

SEQ ID NO: 28960 - protein, 11 aa, Homo sapiens
ISLTCICSIAC

SEQ ID NO: 28961 - protein, 33 aa, Homo sapiens
LKLGREPATAPRRGRRPAGVEGCTCSLERERQI

SEQ ID NO: 28962 - protein, 42 aa, Homo sapiens
LCVVLGSTPAELTYCQTATYCGPPSVNRGVLSWPYRALLCWG

SEQ ID NO: 28963 - protein, 12 aa, Homo sapiens
RRKTLEPRQRGA

SEQ ID NO: 28964 - protein, 62 aa, Homo sapiens
ISPVPFPLLLILIKKKNNSNCKLATIPYVPHSWHHEGGRRSQADSHHHQDGKSRSGAFPLPG

SEQ ID NO: 28965 - protein, 22 aa, Homo sapiens
MTVCLYLTVSCFSNSMGLLSNR

SEQ ID NO: 28966 - protein, 37 aa, Homo sapiens
KIAPARQTEKKTNNFSFVCGVTFHWPPLPPLLSRFKC

SEQ ID NO: 28967 - protein, 24 aa, Homo sapiens
LQPHGGLSDIEAKEAKLEDRETKS

SEQ ID NO: 28968 - protein, 13 aa, Homo sapiens
IQQLLTARRGFER

SEQ ID NO: 28969 - protein, 11 aa, Homo sapiens
IQQLLTARRGC

SEQ ID NO: 28970 - protein, 10 aa, Homo sapiens
ISLEAEDRPP

SEQ ID NO: 28971 - protein, 462 aa, Homo sapiens
IGGCSDPGLPQGVPQQCLAAWAGTLSLKQRSHFFWAHEAAVPCSAEHGGAMPLQLLLLLILLGPGNSLQLWDTWADEAEKALGPLLARDRRQATEYEYLDYDFLPETEPPEMLRNSTDTTPLTGPGTPESTTVEPAARRSTGLDAGGAVTELTTELANMGNLSTDSAAMEIQTTQPAATEAQTTQPVPTEAQTTPLAATEAQTTRLTATEAQTTPLAATEAQTTPPAATEAQTTQPTGLEAQTTAPAAMEAQTTAPAAMEAQTTPPAAMEAQTTQTTAMEAQTTAPEATEAQTTQPTATEAQTTPLAAMEALSTEPSATEALSMEPTTKRGLFIPFSVSSVTHKGIPMAASNLSVNYPVGAPDHISVKQCLLAILILALVATIFFVCTVVLAVRLSRKGHMYPVRNYSPTEMVCISSLLPDGGEGPSATANGGLSKAKSPGLTPEPREDREGDDLTLHSFLP

SEQ ID NO: 28972 - protein, 93 aa, Homo sapiens
TSYSQCLNSKQRNVSMRPCIWIHVHLKPPCRLVELLPFSSALQGLSHLSLGTTLPVILPERNEEQNLQELSHNADKYQMGDCCKEEIDDSIFY

SEQ ID NO: 28973 - protein, 30 aa, Homo sapiens
RLQKRWKKGHVHSAPKMSNIMSYTLHNQRI

SEQ ID NO: 28974 - protein, 8 aa, Homo sapiens
MTPPEKLL

SEQ ID NO: 28975 - protein, 98 aa, Homo sapiens
MFGAAARSADLVLLEKNLQAAHGYAQEDRERMHRNIVSLAQNLLNFMIGSILDLWQCFLWFYIGSSLNGTRGKRVPAHFSNTSLHYLNAAWQLLSPYL

SEQ ID NO: 28976 - protein, 67 aa, Homo sapiens
MQERKKRGWYPGSSRCNFREVLVCLVRELRGPGIVFKVVLLPTCPVVPAPVLTATLPFFHPRVGSTK

SEQ ID NO: 28977 - protein, 7 aa, Homo sapiens
LQPPPPE

SEQ ID NO: 28978 - protein, 37 aa, Homo sapiens
TCSPLWPSPRTPTGTKPKTRWAVRASSQPTTSRSGRA

SEQ ID NO: 28979 - protein, 68 aa, Homo sapiens
VVVYSSVELRAPWTSQVFRVFHLELYKVQKTCLEDMTPGPLYFLQKVAYTKLNMPWKLLDMQAPVWEF

SEQ ID NO: 28980 - protein, 78 aa, Homo sapiens
VVVYSSVELRAPWTSQVFRVFHLELYKVQKTCLEDMTPGPLYFLQKQRDATSTSFLMKSFFLKKFINSMRTWLAVWQA

SEQ ID NO: 28981 - protein, 515 aa, Homo sapiens
VARSGPSAASALVLSHDSHSVLHSPRVRVPRAAVERRLPAVPRGRGAMAARGSGPRALRLLLLVQLVAGRCGLAGAAGGAQRGLSEPSSIAKHEDSLLKDLFQDYERWVRPVEHLNDKIKIKFGLAISQLVDVDEKNQLMTTNVWLKQEWIDVKLRWNPDDYGGIKVIRVPSDSVWTPDIVLFDNADGRFEGTSTKTVIRYNGTVTWTPPANYKSSCTIDVTFFPFDLQNCSMKFGSWTYDGSQVDIILEDQDVDKRDFFDNGEWEIVSATGSKGNRTDSCCWYPYVTYSFVIKRLPLFYTLFLIIPCIGLSFLTVLVFYLPSNEGEKICLCTSVLVSLTVFLLVIEEIIPSSSKVIPLIGEYLVFTMIFVTLSIMVTVFAINIHHRSSSTHNAMAPLVRKIFLHTLPKLLCMRSHVDRYFTQKEETESGSGPKSSRNTLEAALDSIRYITRHIMKENDVREVVEDWKFIAQVLDRMFLWTFLFVSIVGSLGLFVPVIYKWANILIPVHIGNANK

SEQ ID NO: 28982 - protein, 47 aa, Homo sapiens
IGLQPITVSFCPQKRRQQPLPNVESKKCEPRNSETDLNYLPRLRTRA

SEQ ID NO: 28983 - protein, 14 aa, Homo sapiens
MIVSFLRPPSHASC

SEQ ID NO: 28984 - protein, 36 aa, Homo sapiens
VVVQVRLKAVVIPICYSMKSPRLLNRVNLRTDSSGT

SEQ ID NO: 28985 - protein, 16 aa, Homo sapiens
VSAFELWRLGSGWRFF

SEQ ID NO: 28986 - protein, 28 aa, Homo sapiens
RRSISSPCLLRNQRSLISSWGPLSRMRF

SEQ ID NO: 28987 - protein, 7 aa, Homo sapiens
LLIVPLK

SEQ ID NO: 28988 - protein, 18 aa, Homo sapiens
VDDLGIISQIDGTARIVN

SEQ ID NO: 28989 - protein, 14 aa, Homo sapiens
MNMIILCWKSLRGN

SEQ ID NO: 28990 - protein, 23 aa, Homo sapiens
LPASASQSAEMTGVSHQTQHFFF

SEQ ID NO: 28991 - protein, 13 aa, Homo sapiens
MPWFPQVGSCFSS

SEQ ID NO: 28992 - protein, 39 aa, Homo sapiens
IAVRRSESLPIVQSSRKKRSQSPTLSALMEVSSFGKSFI

SEQ ID NO: 28993 - protein, 14 aa, Homo sapiens
IPHSFRPNGGLQFR

SEQ ID NO: 28994 - protein, 20 aa, Homo sapiens
LWVWASSCTVSARNGKLPSP

SEQ ID NO: 28995 - protein, 42 aa, Homo sapiens
LVSRGRGHRLWHLSFCASPQGPSVRQAPTVSLPGLVNLQTQV

SEQ ID NO: 28996 - protein, 15 aa, Homo sapiens
VDRDSCLCPRVCARV

SEQ ID NO: 28997 - protein, 18 aa, Homo sapiens
MLYLKNTSKFSAQEIGLM

SEQ ID NO: 28998 - protein, 48 aa, Homo sapiens
RSEMRGLECGWAPGAMGGCGAGEIKSELLLPGVPTSSSGQSVHSQPDR

SEQ ID NO: 28999 - protein, 210 aa, Homo sapiens
VRPGSARAAPRGAARSGGRLGAGGLEEQVHVKIFWQLSVETIDHPALISTCSVLARESAQMSKISQQNSTPGVNGISVIHTQAHASGLQQVPQLVPAGPGGGGKAVAPSKQSKKSSPMDRNSDEYRQRRERNNMAVKKSRLKSKQKAQDTLQRVNQLKEENERLEAKIKLLTKELSVLKDLFLEHAHNLADNVQSISTENTTADGDNAGQ

SEQ ID NO: 29000 - protein, 84 aa, Homo sapiens
ILKNYTEGDNNVITKSTTHTACVLVYWFLCDNHRDTDHPFRHGPTAAGGFPYRDEGRLRHRLPFPSVLWSLGGHEQPREWGLAV

SEQ ID NO: 29001 - protein, 54 aa, Homo sapiens
LVSPRYGSSASAVRPLGLLADRCPSRTTHCMQRKTVPNKQSVLFFVPARTETGE

SEQ ID NO: 29002 - protein, 9 aa, Homo sapiens
VYQCVLILA

SEQ ID NO: 29003 - protein, 32 aa, Homo sapiens
IQKTKDCQLTSVLCAQWPQVTCLQEEAELRCL

SEQ ID NO: 29004 - protein, 34 aa, Homo sapiens
KGLILSPRLECSGAMMAHCSLDLGSSDPPPQLPE

SEQ ID NO: 29005 - protein, 23 aa, Homo sapiens
RNFTGIIIQINCKHSIQMELFLR

SEQ ID NO: 29006 - protein, 24 aa, Homo sapiens
MPSEYVCHKLGVRNPHRHWTIQKT

SEQ ID NO: 29007 - protein, 131 aa, Homo sapiens
VPLRSFPPPRAQSRDGNGPGADPPGQGDDGPEAQGEDGEAVRAGQRAGPLRRGARPDGDCVQPLHGRQTSAGPGGSRGGAAGRPGATGSPEASPAGERQAAGHGPRRPGPVQPAARLLGTVGDQRSGRETQ

SEQ ID NO: 29008 - protein, 12 aa, Homo sapiens
KPLPAFLRAVPR

SEQ ID NO: 29009 - protein, 16 aa, Homo sapiens
IEDFRGNDSDEMQGTW

SEQ ID NO: 29010 - protein, 37 aa, Homo sapiens
LRPGRGAPASPEEGARGEEFREEIISEIFAEDAGMWI

SEQ ID NO: 29011 - protein, 17 aa, Homo sapiens
MKPVLVWCWVQMQCGSG

SEQ ID NO: 29012 - protein, 58 aa, Homo sapiens
IPRQNHPSSPKYLSFRLNKPVLQTASSMHFPMMLAALKILSDLELYLYGNNRVFLKYN

SEQ ID NO: 29013 - protein, 11 aa, Homo sapiens
VWFSYSRDICC

SEQ ID NO: 29014 - protein, 49 aa, Homo sapiens
VSGPRALGGSAARSVGACSRAVWRAWRTGQPPNLQAHRLDAVDKRGESD

SEQ ID NO: 29015 - protein, 36 aa, Homo sapiens
MGQIWRKRRLWPWGLVLEGISVMGMRRASLERGPSP

SEQ ID NO: 29016 - protein, 34 aa, Homo sapiens
LRTPLAARARSAARPHRYFCCAVQGTLLAQDSQC

SEQ ID NO: 29017 - protein, 22 aa, Homo sapiens
LPGPGAQRGRTGIFAVLCKELC

SEQ ID NO: 29018 - protein, 26 aa, Homo sapiens
VPEPVPVFRSSQHSSWEGGATSLSLP

SEQ ID NO: 29019 - protein, 22 aa, Homo sapiens
KNLSSSTHGITRLMCTMHLYDH

SEQ ID NO: 29020 - protein, 21 aa, Homo sapiens
LQGEERGRLRRIPFPPEITQC

SEQ ID NO: 29021 - protein, 47 aa, Homo sapiens
LSYGRRPRQDGVKPVVSTEDECQDVIFKMRDGTSALLSPVGRLPHLD

SEQ ID NO: 29022 - protein, 14 aa, Homo sapiens
ICVYIIDYAREFSR

SEQ ID NO: 29023 - protein, 8 aa, Homo sapiens
LRPAWATS

SEQ ID NO: 29024 - protein, 81 aa, Homo sapiens
ILPAPVPAAARSRGQRPSGGHRGARWKRRGENTPSAVTTLTPLTVMRHLHPHQDAPNCPAAPSRAGPDRTKRSPPRFSGQT

SEQ ID NO: 29025 - protein, 47 aa, Homo sapiens
TLAAGLPGAVPPGFTVRDFLRGTSGSKPRWSMSGNLTSKGFSKSCSC

SEQ ID NO: 29026 - protein, 16 aa, Homo sapiens
VFFLLRLQNCRDVFDF

SEQ ID NO: 29027 - protein, 20 aa, Homo sapiens
MERVTQPAIRVTNPSTRVHS

SEQ ID NO: 29028 - protein, 69 aa, Homo sapiens
LIRLIWLARRVSPSSLTAPCASLPKLRARSKRTTIPDRGGPVFGQGYTSSCAPLLEPPNKLSRSICRRT

SEQ ID NO: 29029 - protein, 42 aa, Homo sapiens
KQCSRTQGASVRHMEVMVFLREKITEETSALMALQSWQYYNP

SEQ ID NO: 29030 - protein, 47 aa, Homo sapiens
IATPSVDMPLRLLRTLTSSWLPCLLPFPVSIFLYFLSFYYHHAMPLE

SEQ ID NO: 29031 - protein, 14 aa, Homo sapiens
RNNGAVFSGTVEQL

SEQ ID NO: 29032 - protein, 43 aa, Homo sapiens
RRRKRTQSSPASAFVHIAPSFNISPPTEDIIWDQADEPLKHSR

SEQ ID NO: 29033 - protein, 19 aa, Homo sapiens
RRRKRTQSSPASAAVCFRK

SEQ ID NO: 29034 - protein, 35 aa, Homo sapiens
VGPLGGGSASESDPTGFLHDSRHRLSRRFCDSGKG

SEQ ID NO: 29035 - protein, 11 aa, Homo sapiens
MTRSLINSWGV

SEQ ID NO: 29036 - protein, 15 aa, Homo sapiens
LAAYGRRREPGRRGA

SEQ ID NO: 29037 - protein, 60 aa, Homo sapiens
VRGGRADSLRPGLRWSRNSGTWTCGAPGATSRALRASWRGILPFASKRGEDRGKRMQGGC

SEQ ID NO: 29038 - protein, 256 aa, Homo sapiens
KPETYLMPKDGKSTATDITGPIILQTYRAIADYEKTSGSEMALSTGDVVEVVEKSESGWWFCQMKAKRGWIPASFLEPLDSPDETEDPEPNYAGEPYVAIKAYTAVEGDEVSLLEGEAVEVIHKLLDGWWVIRKDDVTGYFPSMYLQKSGQDVSQAQRQIKRGAPPRRSSIRNAHSIHQRSRKRLSQDAYRRNSVRFLQQRRRQARPGPQSPGSPLEEERQTQRSKPQPAVPPRPSADLILNRCSESTKRKLASAV

SEQ ID NO: 29039 - protein, 13 aa, Homo sapiens
MELEEKCLALDDV

SEQ ID NO: 29040 - protein, 10 aa, Homo sapiens
IFSRDEVSPC

SEQ ID NO: 29041 - protein, 32 aa, Homo sapiens
LRPHREGRRPRRTQRRLPAGGSAPPGPPTALV

SEQ ID NO: 29042 - protein, 10 aa, Homo sapiens
VVAAAETAGP

SEQ ID NO: 29043 - protein, 7 aa, Homo sapiens
IEVPKFN

SEQ ID NO: 29044 - protein, 67 aa, Homo sapiens
VRRTPGGPTGRVGPGLARRVCEDRGPVLPGRRASGGEGPGPARPVREDWGPGPAPPPPPPPRWPSSR

SEQ ID NO: 29045 - protein, 114 aa, Homo sapiens
IPTCERPLAPKKKKKKKKKEKKRHKKVETFPCPFHQVLKNQNGFREKLSDSSDQQDRTWRSESAWGGFCEWTATPGCSPPEDSGTCSSRCQALRHLQAASGQPWLCQQNSWQVL

SEQ ID NO: 29046 - protein, 87 aa, Homo sapiens
VEGLDCLSLLTFIFPLCWMPPALKHQTPGSSAFGLLDLPPEWFARGSQAFGYRLRAALSAFLLLRFWDFTGFLAPQLADGLLWDLTL

SEQ ID NO: 29047 - protein, 93 aa, Homo sapiens
RLLLFSHLLPEPGELLGDASGVRAGHEQRLPVLGLGPAILDPLTGLPRWWIRIFTSFKGRLTLWLGPSNEMPDGAPIHHWMKNGILCCIVSVI

SEQ ID NO: 29048 - protein, 25 aa, Homo sapiens
RDARLGVVVGEEVASSGLQGTDRER

SEQ ID NO: 29049 - protein, 15 aa, Homo sapiens
RRGLRGTLLGCWGQH

SEQ ID NO: 29050 - protein, 13 aa, Homo sapiens
LDLRASSGRFWVG

SEQ ID NO: 29051 - protein, 12 aa, Homo sapiens
RLLEELEEFGRP

SEQ ID NO: 29052 - protein, 12 aa, Homo sapiens
RTFVTEVIQDQE

SEQ ID NO: 29053 - protein, 30 aa, Homo sapiens
LIAKLRQFQQICKQFVCLVGVMKYFSFVNR

SEQ ID NO: 29054 - protein, 15 aa, Homo sapiens
LAVACYGWDWWGGFR

SEQ ID NO: 29055 - protein, 7 aa, Homo sapiens
LGLVGWV

SEQ ID NO: 29056 - protein, 19 aa, Homo sapiens
MQKLFGYGSVWFSFGIFFR

SEQ ID NO: 29057 - protein, 19 aa, Homo sapiens
MKMLHYINPGIKEAEINER

SEQ ID NO: 29058 - protein, 22 aa, Homo sapiens
RWEIMIRVKGNYTFYFQKVRGL

SEQ ID NO: 29059 - protein, 8 aa, Homo sapiens
REGVPVGF

SEQ ID NO: 29060 - protein, 22 aa, Homo sapiens
MQEHSADTRMRRAREARPSKKK

SEQ ID NO: 29061 - protein, 11 aa, Homo sapiens
TYAKGQRSQTQ

SEQ ID NO: 29062 - protein, 16 aa, Homo sapiens
KELPVEFTSGQNEENR

SEQ ID NO: 29063 - protein, 8 aa, Homo sapiens
ISFTFTAS

SEQ ID NO: 29064 - protein, 9 aa, Homo sapiens
IKLAHYDRQ

SEQ ID NO: 29065 - protein, 7 aa, Homo sapiens
MTDSENT

SEQ ID NO: 29066 - protein, 31 aa, Homo sapiens
VGPARVCVCVRVCVRARWRGGTNCFTLSTLH

SEQ ID NO: 29067 - protein, 27 aa, Homo sapiens
LTVICGLEPLAGEAEIFRGLLGCAKGS

SEQ ID NO: 29068 - protein, 141 aa, Homo sapiens
VRRPSALWDTGSLERRLRVPSPPLARTHRNIHTPPASPLFPLRLPLPPLAIRRPGGRRGDEDGGREAEAERAAETLDRLRDGPRASGGEAPEDQGEVRRWRRLPGCLLQRRHGRGPQAAAPRRRHQLRQCGRTHCPAPGLH

SEQ ID NO: 29069 - protein, 79 aa, Homo sapiens
IIRKHVHLLTIIEWNSRKSVSVDAALWSEVFHRDFVKKNFIVSWEFSSKQNYGKKGRNSRKICTVGFYCHELEASQVDQ

SEQ ID NO: 29070 - protein, 31 aa, Homo sapiens
KTGVWRLAGLGTAELADFRSGPLLTAEGKAG

SEQ ID NO: 29071 - protein, 27 aa, Homo sapiens
LLRLQMKDAPGTPSQQLLQHERYAWFS

SEQ ID NO: 29072 - protein, 11 aa, Homo sapiens
LGSHSALVECV

SEQ ID NO: 29073 - protein, 20 aa, Homo sapiens
LNTEDSPWSWGCAGFSLLLF

SEQ ID NO: 29074 - protein, 7 aa, Homo sapiens
RDPGGTS

SEQ ID NO: 29075 - protein, 11 aa, Homo sapiens
VAGRHGHSSRC

SEQ ID NO: 29076 - protein, 31 aa, Homo sapiens
LLPSWAPLPQATRRDAPAAQHRFLSGSWALL

SEQ ID NO: 29077 - protein, 19 aa, Homo sapiens
TRSPPLAFVVLRFSARTLC

SEQ ID NO: 29078 - protein, 48 aa, Homo sapiens
VNLLFGLGWKVGNWVGGCGPLNVDYLVCISWAQKTHDLFSIRGLICSA

SEQ ID NO: 29079 - protein, 47 aa, Homo sapiens
KSERRSAFSAFQLGREAFPAGIFGWRWRCAGKKGEERRPGWVMSQHE

SEQ ID NO: 29080 - protein, 27 aa, Homo sapiens
LWVWASSCTVSVSGSLDEARNGKLPSP

SEQ ID NO: 29081 - protein, 11 aa, Homo sapiens
KDGARWENRVR

SEQ ID NO: 29082 - protein, 39 aa, Homo sapiens
LSLAARWVLDVGFDHLADGNGLSQSAPFFCPPHVTEMLL

SEQ ID NO: 29083 - protein, 24 aa, Homo sapiens
MSGSTTWPMGMVCHSLLLFFVRHT

SEQ ID NO: 29084 - protein, 48 aa, Homo sapiens
TGARERHWGRWGPCWVRVCTSDAAAASPPVRAGQHPSEKASPRRKTNR

SEQ ID NO: 29085 - protein, 30 aa, Homo sapiens
LRCPECGTSPSCSQASYAIVLPVSSRFVCG

SEQ ID NO: 29086 - protein, 24 aa, Homo sapiens
VVLPPGLTSLWFVCLCSASSGAAC

SEQ ID NO: 29087 - protein, 62 aa, Homo sapiens
LQLPWALCGLDAELGRRGRAITPIHCQWNYSYSGSVYRIAFSRLPGDAQSQYILRKRNIKEI

SEQ ID NO: 29088 - protein, 23 aa, Homo sapiens
RRDPEETRQEETPGPFAFKERAT

SEQ ID NO: 29089 - protein, 78 aa, Homo sapiens
IARHRTPSLEICRHLDFSHAVCQVSAATRRQGAGPCGLCCTSDGFAPASALSLLQHSDLHPLRGFHCPRGENAPGSVT

SEQ ID NO: 29090 - protein, 15 aa, Homo sapiens
MARGEVSCLCLAILG

SEQ ID NO: 29091 - protein, 28 aa, Homo sapiens
LSILLFMILLTATSASQVQAILLPQPPK

SEQ ID NO: 29092 - protein, 13 aa, Homo sapiens
ICNLPNKLPNLLC

SEQ ID NO: 29093 - protein, 779 aa, Homo sapiens
TQLYCSSAPPPARRASSGCTEAEGRGGGGGSRSRSLSSERPAGGEGVTMSGSRQAGSGSAGTSPGSSAASSVTSASSSLSSSPSPPSVAVSAAALVSGGVAQAAGSGGLGGPVRPVLVAPAVSGSGGGAVSTGLSRHSCAARPSAGVGGSSSSLGSGSRKRPLLAPLCNGLINSYEDKSNDFVCPICFDMIEEAYMTKCGHSFCYKCIHQSLEDNNRCPKCNYVVDNIDHLYPNFLVNELILKQKQRFEEKRFKLDHSVSSTNGHRWQIFQDWLGTDQDNLDLANVNLMLELLVQKKKQLEAESHAAQLQILMEFLKVARRNKREQLEQIQKELSVLEEDIKRVEEMSGLYSPVSEDSTVPQFEAPSPSHSSIIDSTEYSQPPGFSGSSQTKKQPWYNSTLASRRKRLTAHFEDLEQCYFSTRMSRISDDSRTASQLDEFQECLSKFTRYNSVRPLATLSYASDLYNGSSIVSSIEFDRDCDYFAIAGVTKKIKVYEYDTVIQDAVDIHYPENEMTCNSKISCISWSSYHKNLLASSDYEGTVILWDGFTGQRSKVYQEHEKRCWSVDFNLMDPKLLASGSDDAKVKLWSTNLDNSVASIEAKANVCCVKFSPSSRYHLAFGCADHCVHYYDLRNTKQPIMVFKGHRKAVSYAKFVSGEEIVSASTDSQLKLWNVGKPYCLRSFKGHINEKNFVGLASNGDYIACGSENNSLYLYYKGLSKTLLTFKFDTVKSVLDKDRKEDDTNEFVSAVCWRALPDGESNVLIAANSQGTIKVLELV

SEQ ID NO: 29094 - protein, 15 aa, Homo sapiens
ISLRKKMEINLKLKQ

SEQ ID NO: 29095 - protein, 22 aa, Homo sapiens
LCGASFKEAKDSEFMIEEMQGF

SEQ ID NO: 29096 - protein, 12 aa, Homo sapiens
TLMSNIKSFAPI

SEQ ID NO: 29097 - protein, 10 aa, Homo sapiens
KHHTFVFCPD

SEQ ID NO: 29098 - protein, 15 aa, Homo sapiens
TFLKYATCSPTRCST

SEQ ID NO: 29099 - protein, 8 aa, Homo sapiens
LLLPCISQ

SEQ ID NO: 29100 - protein, 17 aa, Homo sapiens
RTTGMRHNIRLKKNNFF

SEQ ID NO: 29101 - protein, 20 aa, Homo sapiens
MTSIKIAFDENNWEMKQEAL

SEQ ID NO: 29102 - protein, 46 aa, Homo sapiens
KTFFYTINNFFLSYTFFRYKRLTNIVQFLLLVGFLSCVSLVFVKFN

SEQ ID NO: 29103 - protein, 7 aa, Homo sapiens
RLRQWIT

SEQ ID NO: 29104 - protein, 48 aa, Homo sapiens
KPLPDRRPCRRRRLRALYWDGVRGPAAREKRAAPQTGPGPAPAPASST

SEQ ID NO: 29105 - protein, 15 aa, Homo sapiens
VAHACNPSTLRGQGG

SEQ ID NO: 29106 - protein, 11 aa, Homo sapiens
VNISKMNQEYV

SEQ ID NO: 29107 - protein, 12 aa, Homo sapiens
TGNRPWERYVVG

SEQ ID NO: 29108 - protein, 12 aa, Homo sapiens
LGAQVLLQSCKV

SEQ ID NO: 29109 - protein, 13 aa, Homo sapiens
LDPRVLPTEITEL

SEQ ID NO: 29110 - protein, 15 aa, Homo sapiens
LPITPMHANSKFDRI

SEQ ID NO: 29111 - protein, 16 aa, Homo sapiens
LPITPMHANTLKFSPS

SEQ ID NO: 29112 - protein, 12 aa, Homo sapiens
TSAFASVWAGGR

SEQ ID NO: 29113 - protein, 24 aa, Homo sapiens
LRASIRAKDGGAGRVKSFNPVKTS

SEQ ID NO: 29114 - protein, 13 aa, Homo sapiens
TCGRTATCTEVES

SEQ ID NO: 29115 - protein, 18 aa, Homo sapiens
LPHVLRLSRDGHRLRVLA

SEQ ID NO: 29116 - protein, 26 aa, Homo sapiens
LKMQRYTKKLPEHLGEYLMENRLVKT

SEQ ID NO: 29117 - protein, 37 aa, Homo sapiens
MRVAVCPLIEARLSWKFQSCNDFWLVPRGLLDCCVKS

SEQ ID NO: 29118 - protein, 10 aa, Homo sapiens
LEVPKLQRFL

SEQ ID NO: 29119 - protein, 27 aa, Homo sapiens
IQKKALRFTNMKIKHVILDYVPFCYYF

SEQ ID NO: 29120 - protein, 32 aa, Homo sapiens
LCQLVPLRSKSYSGCHAATRSSPFIPTPRRWL

SEQ ID NO: 29121 - protein, 37 aa, Homo sapiens
ISQSILSRKNFYSISKTSLDFLILHKTKEKRNGSLQF

SEQ ID NO: 29122 - protein, 77 aa, Homo sapiens
IGSSRCLFHHQMPWRPWSVPWAWPSAWWASSWAPSSSSWAHMCPVSPGNDPSERNDLWETPCRSSWVCDSPCVLSAL

SEQ ID NO: 29123 - protein, 38 aa, Homo sapiens
KVTKYLNRRGLRRDLNSSCPTNSISAFLLTSCENYSSG

SEQ ID NO: 29124 - protein, 17 aa, Homo sapiens
VFLQQQSQDAGARGDLT

SEQ ID NO: 29125 - protein, 26 aa, Homo sapiens
LGTGEALIADRGCCHLCLLPAESHKP

SEQ ID NO: 29126 - protein, 11 aa, Homo sapiens
MKPCGAARVPA

SEQ ID NO: 29127 - protein, 19 aa, Homo sapiens
LQRGWGVNVHPWVGLQPSS

SEQ ID NO: 29128 - protein, 10 aa, Homo sapiens
MPAGTPPFLG

SEQ ID NO: 29129 - protein, 11 aa, Homo sapiens
LEPCFKKIPKL

SEQ ID NO: 29130 - protein, 12 aa, Homo sapiens
IFLSSGFHFLNV

SEQ ID NO: 29131 - protein, 23 aa, Homo sapiens
IQGLGPHSLPSFILRSGEIDRRC

SEQ ID NO: 29132 - protein, 12 aa, Homo sapiens
MVQCGHEMKTPK

SEQ ID NO: 29133 - protein, 15 aa, Homo sapiens
VVPHHPPPLPPPATP

SEQ ID NO: 29134 - protein, 16 aa, Homo sapiens
RPCKARALLLHRQVGT

SEQ ID NO: 29135 - protein, 17 aa, Homo sapiens
RLKLKRGCEGRWTCEEG

SEQ ID NO: 29136 - protein, 13 aa, Homo sapiens
ISSDGSSQEGIHS

SEQ ID NO: 29137 - protein, 8 aa, Homo sapiens
KAEGFWKS

SEQ ID NO: 29138 - protein, 24 aa, Homo sapiens
IWGRRPISGCCRFLFFRLILMNLV

SEQ ID NO: 29139 - protein, 22 aa, Homo sapiens
LSRILKANDSRCNRKQENPISG

SEQ ID NO: 29140 - protein, 12 aa, Homo sapiens
IRIIRPPQVYSL

SEQ ID NO: 29141 - protein, 11 aa, Homo sapiens
IQSSQENFRRA

SEQ ID NO: 29142 - protein, 37 aa, Homo sapiens
LQSKGSGLMILKGFLLMVAFVLSSKILFSVVCKQVFF

SEQ ID NO: 29143 - protein, 11 aa, Homo sapiens
LSHNQPGSMMA

SEQ ID NO: 29144 - protein, 17 aa, Homo sapiens
VISALMPTKEICLALNL

SEQ ID NO: 29145 - protein, 11 aa, Homo sapiens
RLYERNSMMCC

SEQ ID NO: 29146 - protein, 8 aa, Homo sapiens
MFYTIDLI

SEQ ID NO: 29147 - protein, 18 aa, Homo sapiens
IFFLEFGGMGGGGGAYLL

SEQ ID NO: 29148 - protein, 14 aa, Homo sapiens
MLGVVIVEGKNPAE

SEQ ID NO: 29149 - protein, 11 aa, Homo sapiens
IEAEYILLVYF

SEQ ID NO: 29150 - protein, 29 aa, Homo sapiens
ISDKKHSKQATVFKKLNWQVEMFKQFSDL

SEQ ID NO: 29151 - protein, 15 aa, Homo sapiens
MEPSCGRRDNKALLS

SEQ ID NO: 29152 - protein, 7 aa, Homo sapiens
KRSVSLT

SEQ ID NO: 29153 - protein, 31 aa, Homo sapiens
KVSPQATSLPHRHPVPFDLAQTLHPSPRCSQ

SEQ ID NO: 29154 - protein, 8 aa, Homo sapiens
VTKTNLNQ

SEQ ID NO: 29155 - protein, 498 aa, Homo sapiens
IHGRKLLNLSHSKSLSALQESQVERAKRKQKQAEQALQELRDLLTEGKQRQEEAVRTREAELRQAMDIPEEYWPSPEEPLRELMENLQRQLNLMKWTLCHRQNLPDRDVVRWASGGLALQGIYKASHQRGLTEKREELLSVPKEFLLLGPQQGTQMKTKEFTSPQAEFMFTQMVEKLGFRLTTSAKDGNWGFSLEAGLDHSKHPESKETQQSSSENSYFCSTKFSYIPLASCHFPIDQLQLSKPAVQELKCIEELLSQTTNPDRFSLLRHRIINFFHRFGSHVNQGPLHLGGIYWWKAISEGYCTEQLAEVRQQSAEALDIFIRDSYSGFGVKVAAGVNVSDSHSKTATQTKTSQNLQTKVQLSVAQTGGPPEADGLVQWKAGLIASNQTWCVIDRGLQLVPVWDIILSSHRSNFKDPLQVANFLKDSYTALTSITAQIQNGEELLSAGKEARVFLEDVKSWEVSDPEEQLKKLINFMKMLSQKLKSYDTWINICLTD

SEQ ID NO: 29156 - protein, 7 aa, Homo sapiens
KIRRMAN

SEQ ID NO: 29157 - protein, 19 aa, Homo sapiens
TDSQPNSTRGTRRSWYYAF

SEQ ID NO: 29158 - protein, 15 aa, Homo sapiens
LAETQQKKRILDQYP

SEQ ID NO: 29159 - protein, 17 aa, Homo sapiens
ICLGGHQKVNFPSSWTT

SEQ ID NO: 29160 - protein, 100 aa, Homo sapiens
RRKSCGACRALSLQLPQGGGGQHHPHPGGLPKTGACLLPLSQHLRELHYSPGLHPHPADHPRESETWQPQLQSHPLVRALSCVHVTECLFETGRDEDKYG

SEQ ID NO: 29161 - protein, 23 aa, Homo sapiens
MSQKEERICEMPGKPSCSPGKSK

SEQ ID NO: 29162 - protein, 22 aa, Homo sapiens
VDTACEDNSFKKFGCQGKQRMC

SEQ ID NO: 29163 - protein, 14 aa, Homo sapiens
MTLFEPRDPDMPEN

SEQ ID NO: 29164 - protein, 38 aa, Homo sapiens
VSGLEDFPNIFCSDLTQPLQMDPCTPLSDEVIVVGVCS

SEQ ID NO: 29165 - protein, 66 aa, Homo sapiens
IFREGTLATQTGQEQPGAKQTGKWSHLFPPSADEAQPHFSRGPRQEAIYLRQILSFFLSPIFSGSL

SEQ ID NO: 29166 - protein, 12 aa, Homo sapiens
KHHRLTNNHAQE

SEQ ID NO: 29167 - protein, 46 aa, Homo sapiens
MKGDKRQKEGDPKKRPQAPEADEETNRRAEEWQNGTAERRKGTSEC

SEQ ID NO: 29168 - protein, 13 aa, Homo sapiens
INSSSLLFLDQKK

SEQ ID NO: 29169 - protein, 12 aa, Homo sapiens
LLWVPETPMQPS

SEQ ID NO: 29170 - protein, 40 aa, Homo sapiens
RRGAPGTGVWDSRQERLRLPRTGTFATHQILAPGSRERTG

SEQ ID NO: 29171 - protein, 50 aa, Homo sapiens
IAADGVGKSAHMYRAKTGRAETPTSAGSTRNLTGCGRAGRGVMPAWAGPT

SEQ ID NO: 29172 - protein, 15 aa, Homo sapiens
MAFMMSETSLNRIQD

SEQ ID NO: 29173 - protein, 29 aa, Homo sapiens
KTGARELDPARVYRLPSSLFASKTTTPKR

SEQ ID NO: 29174 - protein, 7 aa, Homo sapiens
MAEEHKL

SEQ ID NO: 29175 - protein, 13 aa, Homo sapiens
VRTSLMCGQQQTT

SEQ ID NO: 29176 - protein, 16 aa, Homo sapiens
TGFHCVSQDGLDPLTS

SEQ ID NO: 29177 - protein, 20 aa, Homo sapiens
LTSSILWKSAVPDRGMVTRL

SEQ ID NO: 29178 - protein, 30 aa, Homo sapiens
RRRPGRRRRRRPARIRCSQVPCSSLQKKNH

SEQ ID NO: 29179 - protein, 69 aa, Homo sapiens
IGDSSAWTRGTSPRVPGVGIGSRCNDSGHPPAKSCSGKSSSPLRVQAPAPEDSFTPIPATSTNAKKRQG

SEQ ID NO: 29180 - protein, 19 aa, Homo sapiens
LFGSTNRKQTNKKQLPKTS

SEQ ID NO: 29181 - protein, 33 aa, Homo sapiens [sequence omitted]

SEQ ID NO: 29182 - protein, 35 aa, Homo sapiens
TKPPQSRRDAAPLGGAGRGGPGSMAAARTPRGGGH

SEQ ID NO: 29183 - protein, 35 aa, Homo sapiens
TEPRRSGSRVTTLSPLGETYLVLTTTDKGLKGPGR

SEQ ID NO: 29184 - protein, 10 aa, Homo sapiens
MERGCRRMIK

SEQ ID NO: 29185 - protein, 12 aa, Homo sapiens
MSSGDDFWKWSC

SEQ ID NO: 29186 - protein, 16 aa, Homo sapiens
MTKVELVNYYIEYTLC

SEQ ID NO: 29187 - protein, 21 aa, Homo sapiens
LHSSLATERGSVSKKKVHNVG

SEQ ID NO: 29188 - protein, 38 aa, Homo sapiens
LCCTSDGFAPASALSLLQHSDLHPLRGFHCPRGENAPG

SEQ ID NO: 29189 - protein, 15 aa, Homo sapiens
VIHPPRLPKVLGLQA

SEQ ID NO: 29190 - protein, 42 aa, Homo sapiens
TRHAVRLRGCATKTSPGAAPRPPHPALARPKTGAKLPRRLPS

SEQ ID NO: 29191 - protein, 11 aa, Homo sapiens
MQQKKEGPLSD

SEQ ID NO: 29192 - protein, 12 aa, Homo sapiens
VMPRLTDVRRLS

SEQ ID NO: 29193 - protein, 15 aa, Homo sapiens
KMRGAGRNNLGTLKG

SEQ ID NO: 29194 - protein, 26 aa, Homo sapiens
ILARLFSTPDLVIRPPQPPKVLGLQL

SEQ ID NO: 29195 - protein, 12 aa, Homo sapiens
LFLCSFQHGREV

SEQ ID NO: 29196 - protein, 31 aa, Homo sapiens
KMPGLANMKVNTNERKEESKTKTSTDPDIDQ

SEQ ID NO: 29197 - protein, 12 aa, Homo sapiens
MFTTTSDRTRNH

SEQ ID NO: 29198 - protein, 10 aa, Homo sapiens
IGTWYSSGIT

SEQ ID NO: 29199 - protein, 48 aa, Homo sapiens
MHATWFRKKNKNEQTRRPFRFMITKLQGNKSAGPTAIYCTRETSQKIL

SEQ ID NO: 29200 - protein, 51 aa, Homo sapiens [sequence omitted]

SEQ ID NO: 29201 - protein, 25 aa, Homo sapiens
VDEEEPETPRRRPDRRRTVPGRAGG

SEQ ID NO: 29202 - protein, 23 aa, Homo sapiens
IGTQALDRKLEVEMVESNLPGPA

SEQ ID NO: 29203 - protein, 11 aa, Homo sapiens
KQMLTEHEGLN

SEQ ID NO: 29204 - protein, 18 aa, Homo sapiens
MTCLGMESRLDYTVWSKF

SEQ ID NO: 29205 - protein, 10 aa, Homo sapiens
KQACSLLLER

SEQ ID NO: 29206 - protein, 16 aa, Homo sapiens
KQACSLLLERVLPHPS

SEQ ID NO: 29207 - protein, 55 aa, Homo sapiens
VTELKDSCRRLSQSVAMCKTGCLPGRPRNIWPSRPRLYPSKFPLYPEFLELVSKG

SEQ ID NO: 29208 - protein, 24 aa, Homo sapiens
MGNGIRSFLTIWNSRSPVRHWICF

SEQ ID NO: 29209 - protein, 7 aa, Homo sapiens
LASLYVS

SEQ ID NO: 29210 - protein, 14 aa, Homo sapiens
LDLLRVKKKKSEIG

SEQ ID NO: 29211 - protein, 15 aa, Homo sapiens
LLPQATGFPTPWLLM

SEQ ID NO: 29212 - protein, 8 aa, Homo sapiens
LGAETAKS

SEQ ID NO: 29213 - protein, 24 aa, Homo sapiens
LGGSAARSVGACSRAVWRRLGIVK

SEQ ID NO: 29214 - protein, 43 aa, Homo sapiens
TQNHCGHLWRLGCSWRRCLFRKGLYQGRPFSCLCCSLGGKIPC

SEQ ID NO: 29215 - protein, 7 aa, Homo sapiens
LASLCVS

SEQ ID NO: 29216 - protein, 10 aa, Homo sapiens
RLEKNFFPSK

SEQ ID NO: 29217 - protein, 8 aa, Homo sapiens
TLSTRSFH

SEQ ID NO: 29218 - protein, 18 aa, Homo sapiens
MEKGEGERNGGNLDNTLK

SEQ ID NO: 29219 - protein, 22 aa, Homo sapiens
KKERKKKKEKKKKRTTALDKSL

SEQ ID NO: 29220 - protein, 50 aa, Homo sapiens
IRKVPGLISWDRPHLQDSSVQYLEESLTGFFGKVAIHGMNEMFSFYSNPT

SEQ ID NO: 29221 - protein, 7 aa, Homo sapiens
VTWLASF

SEQ ID NO: 29222 - protein, 11 aa, Homo sapiens
IIDNELAPQFK

SEQ ID NO: 29223 - protein, 8 aa, Homo sapiens
IGHSKMNV

SEQ ID NO: 29224 - protein, 16 aa, Homo sapiens
MIFESKTLFCYIATPF

SEQ ID NO: 29225 - protein, 16 aa, Homo sapiens
VPRAPLGRPWVAVPCL

SEQ ID NO: 29226 - protein, 13 aa, Homo sapiens
KPTIPSVTIGKCL

SEQ ID NO: 29227 - protein, 36 aa, Homo sapiens
LFLQPCGAASCPQPSLATVRRRSLYRRPNLPWKRQL

SEQ ID NO: 29228 - protein, 22 aa, Homo sapiens
TSWRRGAEGRRGNLAQRLGEET

SEQ ID NO: 29229 - protein, 34 aa, Homo sapiens
LAERSRRQEGKSGTTAGRGNLMLLGHHLPGPRSR

SEQ ID NO: 29230 - protein, 36 aa, Homo sapiens
REQVPGMGGKSWLFFYSLVFCALLPLPRREDPFKLF

SEQ ID NO: 29231 - protein, 87 aa, Homo sapiens
REQVPGMGDAERSLFVCCGRAVTLDLVFQPAPRFLPSWIWGAALPGAGRSNETAKKHKMNRQSNQPKTGGSSRPARRHLLLPSLEAL

SEQ ID NO: 29232 - protein, 38 aa, Homo sapiens
LSGSFKCVEQGRGMMRKTFFFFFLETPKEACLCAAAVL

SEQ ID NO: 29233 - protein, 12 aa, Homo sapiens
LGGSIAWRREIK

SEQ ID NO: 29234 - protein, 38 aa, Homo sapiens
LPGAGRSNETAKKHKMNRQSNQPKEIALEMRKQTLMET

SEQ ID NO: 29235 - protein, 24 aa, Homo sapiens
IDNPTNQRPGAAAGQQDGIFSFPA

SEQ ID NO: 29236 - protein, 31 aa, Homo sapiens
KAAKTKILKKRREGQKKENPKVSAALLRNVF

SEQ ID NO: 29237 - protein, 8 aa, Homo sapiens
LGKGNAKT

SEQ ID NO: 29238 - protein, 18 aa, Homo sapiens
MSPDERRKKTRCLRRPKG

SEQ ID NO: 29239 - protein, 10 aa, Homo sapiens
MLRFLTVCFA

SEQ ID NO: 29240 - protein, 14 aa, Homo sapiens
LLLRPGKSTSFRGC

SEQ ID NO: 29241 - protein, 14 aa, Homo sapiens
KSASVTQILCHVAK

SEQ ID NO: 29242 - protein, 15 aa, Homo sapiens
IQEPSCRVWIGTLFW

SEQ ID NO: 29243 - protein, 22 aa, Homo sapiens
LQHQWANFGDLWLLLRRNKREG

SEQ ID NO: 29244 - protein, 21 aa, Homo sapiens
LLWGFNGQGRLEKGCSAFPFS

SEQ ID NO: 29245 - protein, 19 aa, Homo sapiens
RRGFWADSGQEASCLALWG

SEQ ID NO: 29246 - protein, 11 aa, Homo sapiens
KYWRSIEDRKI

SEQ ID NO: 29247 - protein, 20 aa, Homo sapiens
LDMVVCGSLLEFFSGDLIII

SEQ ID NO: 29248 - protein, 36 aa, Homo sapiens
LRTLFNGPDQDLSGRTNVTLRGISSFMKPFRILNCI

SEQ ID NO: 29249 - protein, 20 aa, Homo sapiens
IFLCRGISSFMKPFRILNCI

SEQ ID NO: 29250 - protein, 51 aa, Homo sapiens
IVYVWVSLSPPLVLILTCRNTQQTHVCEGPEKPDPVRKNSLFTLNKPNIPF

SEQ ID NO: 29251 - protein, 10 aa, Homo sapiens
ILQTIEGASS

SEQ ID NO: 29252 - protein, 36 aa, Homo sapiens
VGMQKFSAKTFSGEHNRLGQASILAEADLQCSSVGS

SEQ ID NO: 29253 - protein, 34 aa, Homo sapiens
IRTGSCPSLQALSPLPRPAGVEGCTCSLERERQI

SEQ ID NO: 29254 - protein, 15 aa, Homo sapiens
VSSAGPTEHFCAGDE

SEQ ID NO: 29255 - protein, 20 aa, Homo sapiens
RLKLQVSKPKCKVDYAKNSQ

SEQ ID NO: 29256 - protein, 9 aa, Homo sapiens
RLKLQVSTV

SEQ ID NO: 29257 - protein, 19 aa, Homo sapiens
TTTHLFPAPPPEFPFAETL

SEQ ID NO: 29258 - protein, 16 aa, Homo sapiens
INLASSLLLLRRAWMI

SEQ ID NO: 29259 - protein, 8 aa, Homo sapiens
VDDLKILA

SEQ ID NO: 29260 - protein, 7 aa, Homo sapiens
LSERERS

SEQ ID NO: 29261 - protein, 8 aa, Homo sapiens
LSSTEDCA

SEQ ID NO: 29262 - protein, 32 aa, Homo sapiens
MVVLMFLSAGPIVPLLRNVSPVQGQRLKRLLY

SEQ ID NO: 29263 - protein, 18 aa, Homo sapiens
IFMSQELSLPHVYSSVCT

SEQ ID NO: 29264 - protein, 10 aa, Homo sapiens
ITASKEFKSS

SEQ ID NO: 29265 - protein, 42 aa, Homo sapiens
IESVEDKIKNKTKQKMSSGEFAIKLAKLTYLGKKVIKQENMR

SEQ ID NO: 29266 - protein, 13 aa, Homo sapiens
MERKEKMEFFRWL

SEQ ID NO: 29267 - protein, 21 aa, Homo sapiens
LGFREGFGLRRGALFCSVLFF

SEQ ID NO: 29268 - protein, 43 aa, Homo sapiens
RGKKKRSERKKKRGKNQDLITRATDRLQTPVSMESRGLSPGSS

SEQ ID NO: 29269 - protein, 18 aa, Homo sapiens
TAARGRRGVFIFLRPQRV

SEQ ID NO: 29270 - protein, 34 aa, Homo sapiens
IFFTSGYPVVPRGPAAGPGDLSRTLLFFSESVLR

SEQ ID NO: 29271 - protein, 24 aa, Homo sapiens
MTCLILFYNSFVCCCVFRTVPGTQ

SEQ ID NO: 29272 - protein, 75 aa, Homo sapiens
VAAVRRDTRAPRSALKRLPRPNPSRPRVRGSRPRTERGRPSPRGRRPESPARPAALPVCRRRVLLEGPMRSGSSP

SEQ ID NO: 29273 - protein, 17 aa, Homo sapiens
KGSRRSFAKAGAVGFDL

SEQ ID NO: 29274 - protein, 19 aa, Homo sapiens
KGSRRSFAKAGAVGLIMIE

SEQ ID NO: 29275 - protein, 15 aa, Homo sapiens
RMKRTGTDQPAVPLT

SEQ ID NO: 29276 - protein, 10 aa, Homo sapiens
LNHQRHARPL

SEQ ID NO: 29277 - protein, 18 aa, Homo sapiens
VTPPWWLWVSAEELGAEA

SEQ ID NO: 29278 - protein, 33 aa, Homo sapiens
MSKRGGAAQAARAWGSAQPASGGLAGGLFPGSQ

SEQ ID NO: 29279 - protein, 7 aa, Homo sapiens
LRLIASQ

SEQ ID NO: 29280 - protein, 15 aa, Homo sapiens
KPEKDPLVATVWQLL

SEQ ID NO: 29281 - protein, 14 aa, Homo sapiens
IRVQLRTFSDLHCG

SEQ ID NO: 29282 - protein, 17 aa, Homo sapiens
MPSCVSSCLDGLYLLTL

SEQ ID NO: 29283 - protein, 9 aa, Homo sapiens
VESPTQNVR

SEQ ID NO: 29284 - protein, 10 aa, Homo sapiens
LTASGLRLGG

SEQ ID NO: 29285 - protein, 14 aa, Homo sapiens
MASSRSSGRAGPGF

SEQ ID NO: 29286 - protein, 9 aa, Homo sapiens
ITNNQLIPG

SEQ ID NO: 29287 - protein, 39 aa, Homo sapiens
IRKKRVSPTSVWFQPYFCILKTLVQRWTLCRMMPLHLGC

SEQ ID NO: 29288 - protein, 7 aa, Homo sapiens
MLFLYGM

SEQ ID NO: 29289 - protein, 21 aa, Homo sapiens
IASVACAVTRTGRGSHLKGKK

SEQ ID NO: 29290 - protein, 31 aa, Homo sapiens
IASVACAVTRTGRGSHLKGKKWIQWPLRMWL

SEQ ID NO: 29291 - protein, 32 aa, Homo sapiens
VSRPLCRSEPPRIRVSSGKTLAECHMTAAPCV

SEQ ID NO: 29292 - protein, 7 aa, Homo sapiens
MESEATT

SEQ ID NO: 29293 - protein, 12 aa, Homo sapiens
VSEVPNDDGWNG

SEQ ID NO: 29294 - protein, 32 aa, Homo sapiens
KSRTTTGGTVSGHRAVGLHSTRLCCRKREMVE

SEQ ID NO: 29295 - protein, 23 aa, Homo sapiens
LNKKRMEYTIWTSIKIHQRAFYY

SEQ ID NO: 29296 - protein, 67 aa, Homo sapiens
TYFILRACTLGSQRGVEGSLLQCWIHKRAFMVCERISVCLGRKLFDLQKSQKTSRTSIKIHQRAFYY

SEQ ID NO: 29297 - protein, 9 aa, Homo sapiens
ICVLREETF

SEQ ID NO: 29298 - protein, 23 aa, Homo sapiens
MPAGEEALGQGLQCGSASPPCWH

SEQ ID NO: 29299 - protein, 25 aa, Homo sapiens
LAATSASQVAGITNISHHAQPSYLF

SEQ ID NO: 29300 - protein, 17 aa, Homo sapiens
MTLKLFGRPSPDLWAYL

SEQ ID NO: 29301 - protein, 9 aa, Homo sapiens
IPKEERADR

SEQ ID NO: 29302 - protein, 17 aa, Homo sapiens
LGFAALAALVVQHLRSG

SEQ ID NO: 29303 - protein, 22 aa, Homo sapiens
KSDQTGCFSAVSNMAGRFNRHG

SEQ ID NO: 29304 - protein, 48 aa, Homo sapiens
MLPREKLRRREERKQINGKKERTKYETPRKREGKKGGNNHICHLSKRD

SEQ ID NO: 29305 - protein, 31 aa, Homo sapiens
IVHDSCSHFAVQMKTLKMTEGDFSGDRGLPG

SEQ ID NO: 29306 - protein, 20 aa, Homo sapiens
VALDSTLWTVVSPRKDENSY

SEQ ID NO: 29307 - protein, 27 aa, Homo sapiens
ISRHFRSLFHRRPTRRRLCCSHVSSDP

SEQ ID NO: 29308 - protein, 28 aa, Homo sapiens
VPERRRKNHLNWGGGNNGAVFSGTVEQL

SEQ ID NO: 29309 - protein, 29 aa, Homo sapiens
LRECLNTDFPQEQWRCLQWHSGAALKMQR

SEQ ID NO: 29310 - protein, 13 aa, Homo sapiens
KLQRFLASATRFT

SEQ ID NO: 29311 - protein, 29 aa, Homo sapiens
RGAAGAVGGAGGAGVLGPGDTEVQAPGTG

SEQ ID NO: 29312 - protein, 14 aa, Homo sapiens
IETKKHRRHKHVTY

SEQ ID NO: 29313 - protein, 12 aa, Homo sapiens
TLTIHRKIHAVL

SEQ ID NO: 29314 - protein, 41 aa, Homo sapiens
RCRDMNFGLLCNPSGAFTDNIDFEVALTWPALPLTRLALYG

SEQ ID NO: 29315 - protein, 39 aa, Homo sapiens
RCRDMNFGLLCNPSGAFTDNIDFEVALTWPALPLTRLGS

SEQ ID NO: 29316 - protein, 22 aa, Homo sapiens
MAKRFLLKSLENCEKTIRRSYL

SEQ ID NO: 29317 - protein, 7 aa, Homo sapiens
MILNARI

SEQ ID NO: 29318 - protein, 33 aa, Homo sapiens
LLIMCISHLERRSSCLVEPSQLMPHEADTSCPY

SEQ ID NO: 29319 - protein, 21 aa, Homo sapiens
RCWDEAVTDTGLDLSLGRVRL

SEQ ID NO: 29320 - protein, 21 aa, Homo sapiens
MFKNTSASLPQVSDLSSNYVC

SEQ ID NO: 29321 - protein, 36 aa, Homo sapiens
KWKEEGKGGGVGWGPDETSGLVSRMKDRLAAEELCS

SEQ ID NO: 29322 - protein, 17 aa, Homo sapiens
KEVTSPVMDFQCEHWPE

SEQ ID NO: 29323 - protein, 8 aa, Homo sapiens
RFLKHDGG

SEQ ID NO: 29324 - protein, 15 aa, Homo sapiens
LKSMTQGELRHLKPS

SEQ ID NO: 29325 - protein, 56 aa, Homo sapiens
TQTKMERLIGSGRMKQFGEDRSLKWKTGRQKYGKAKKRIEKIGKLEDKNILLEEKR

SEQ ID NO: 29326 - protein, 33 aa, Homo sapiens
LKSRKQKKKDKLGNKKLRAKCTNLEENWKIETR

SEQ ID NO: 29327 - protein, 7 aa, Homo sapiens
INFQVGK

SEQ ID NO: 29328 - protein, 8 aa, Homo sapiens
LLFGLFLA

SEQ ID NO: 29329 - protein, 18 aa, Homo sapiens
ILSATTQKHEFFCFFCVG

SEQ ID NO: 29330 - protein, 38 aa, Homo sapiens
ISSSLFSFVVVGGNCRLSGSGLVDDLEPSGTRWRFSGG

SEQ ID NO: 29331 - protein, 44 aa, Homo sapiens
LSTCPAEESFPARLAHRLLPACDVRPRECRGERAGWHELTGGTR

SEQ ID NO: 29332 - protein, 11 aa, Homo sapiens
LATSDRQNQDI

SEQ ID NO: 29333 - protein, 31 aa, Homo sapiens
RSCAWPRGLKVAVGLCEGQNGDGGPCRSPFL

SEQ ID NO: 29334 - protein, 23 aa, Homo sapiens
LRRWALQASCLAVCSENSVFEMP

SEQ ID NO: 29335 - protein, 45 aa, Homo sapiens
MSYWAPVCRIYAHVGTEESSVVAVSSYGHFLISALSLSVWKLLRG

SEQ ID NO: 29336 - protein, 61 aa, Homo sapiens
IYAHVGTEESSVVAMFSPQELTGEGMGQDPSLCKASVTVMFQVFLMTVCLYLTEQLVAIYH

SEQ ID NO: 29337 - protein, 23 aa, Homo sapiens
LTWSSSFQGQHLLSKAQEEFEEN

SEQ ID NO: 29338 - protein, 9 aa, Homo sapiens
RLKLQSQSL

SEQ ID NO: 29339 - protein, 14 aa, Homo sapiens
ILSPQISKVLGLQV

SEQ ID NO: 29340 - protein, 27 aa, Homo sapiens
KEKYMQLKPLVVQEKVLFMMIWNVHIT

SEQ ID NO: 29341 - protein, 66 aa, Homo sapiens [sequence omitted]

SEQ ID NO: 29342 - protein, 24 aa, Homo sapiens
LQLMLEEKARVSDCMYHLHGSRNV

SEQ ID NO: 29343 - protein, 15 aa, Homo sapiens
LERLGKRSLSKFSNC

SEQ ID NO: 29344 - protein, 8 aa, Homo sapiens
LTAEFLPA

SEQ ID NO: 29345 - protein, 84 aa, Homo sapiens
IVSLWVLARITPSEVTPEGGLEGESNERERERKEGREGGRMEGCMDLDVWVPFLLPWQKLTHPSVSIQNGISSWAPSPESPASR

SEQ ID NO: 29346 - protein, 13 aa, Homo sapiens
MQVCGGMKTSPGI

SEQ ID NO: 29347 - protein, 49 aa, Homo sapiens
LLLRLQSSCFLRVRVALLQSRGGEVNLEVVGPRGRLIATSPQAFSLRWR

SEQ ID NO: 29348 - protein, 13 aa, Homo sapiens
LVNSPTARELCFT

SEQ ID NO: 29349 - protein, 43 aa, Homo sapiens
IYTTKISTLLACCFWTKKNDVYYQINYPFWGPRRICPLLSSPS

SEQ ID NO: 29350 - protein, 57 aa, Homo sapiens
VVVYSSVELRAPWTSQVFRVFHLELYKVQKTCLEDMTPGPLYFLQKGHGLQCGRHNF

SEQ ID NO: 29351 - protein, 22 aa, Homo sapiens
LFRWSLSPDLVICLPQLPKVLR

SEQ ID NO: 29352 - protein, 31 aa, Homo sapiens
LLCHPGWECSGMISATSTSQVQAILVPQPPK

SEQ ID NO: 29353 - protein, 15 aa, Homo sapiens
IERIHLSKLQNQTVP

SEQ ID NO: 29354 - protein, 18 aa, Homo sapiens
RSSGFDQEFFAEHGASCL

SEQ ID NO: 29355 - protein, 21 aa, Homo sapiens
RSLASKIMASRFTSIETRPER

SEQ ID NO: 29356 - protein, 8 aa, Homo sapiens
IISPPCTL

SEQ ID NO: 29357 - protein, 38 aa, Homo sapiens
LHPSELTALLLTQSLFRWSSIRTCLTLGAKIWARGTPS

SEQ ID NO: 29358 - protein, 30 aa, Homo sapiens
LMLPDRLRSPLDHHRCRASGNSYGGGFPAI

SEQ ID NO: 29359 - protein, 8 aa, Homo sapiens
IPSHMKTP

SEQ ID NO: 29360 - protein, 30 aa, Homo sapiens
TEGPSGGTEKKEGAISLRLRLQGRFGRGQA

SEQ ID NO: 29361 - protein, 17 aa, Homo sapiens
VVLLLVAVRLHTLLSCP

SEQ ID NO: 29362 - protein, 10 aa, Homo sapiens
VDPLGISRGL

SEQ ID NO: 29363 - protein, 24 aa, Homo sapiens
VDPLGISRVTRRNWVLRHSRACER

SEQ ID NO: 29364 - protein, 18 aa, Homo sapiens
ISVTRRNWVLRHSRACER

SEQ ID NO: 29365 - protein, 28 aa, Homo sapiens
VTTKDPDIILSSVIEKRIWDLRRYLLIF

SEQ ID NO: 29366 - protein, 58 aa, Homo sapiens
IVFPETSQPRFLYSLQNCATGRRQHGRRDKPYRDNVQRRTGRGRKERRRGAGGRRRRY

SEQ ID NO: 29367 - protein, 15 aa, Homo sapiens
IPGSARAHLQPGEHS

SEQ ID NO: 29368 - protein, 13 aa, Homo sapiens
LGPFGSHDVFSRF

SEQ ID NO: 29369 - protein, 13 aa, Homo sapiens
MVLEEPLTTRLLL

SEQ ID NO: 29370 - protein, 14 aa, Homo sapiens
INKAFNKPLFLEVT

SEQ ID NO: 29371 - protein, 19 aa, Homo sapiens
IVARGRVGEKMNNMTGKIS

SEQ ID NO: 29372 - protein, 23 aa, Homo sapiens
MSYCGSEGRERPREISVLRMNRA

SEQ ID NO: 29373 - protein, 72 aa, Homo sapiens
LPDPTDGQSFLSCSPYKKTNRTAKNSNFSSHGEPWKEPESLMELDSAWRWFSRTRCHWRTVWSAERHALKWD

SEQ ID NO: 29374 - protein, 10 aa, Homo sapiens
LRSGLTDEDS

SEQ ID NO: 29375 - protein, 53 aa, Homo sapiens
MKKSEMRRWGRSWDWQRPGCGQILQDLTSKKTGGGAGGGGEDVWPMHAECKAA

SEQ ID NO: 29376 - protein, 21 aa, Homo sapiens
MLWKAVRIEETNWLCQCGVMS

SEQ ID NO: 29377 - protein, 21 aa, Homo sapiens
KLQYHQLERLGMPSSWYWPLS

SEQ ID NO: 29378 - protein, 17 aa, Homo sapiens
MEIRSRWHLCTGMGEPC

SEQ ID NO: 29379 - protein, 39 aa, Homo sapiens
LSYLLKVWRVGLTTLCGASFKEAKDSEFMIEEMQADLLS

SEQ ID NO: 29380 - protein, 26 aa, Homo sapiens
LLLSPFKQPVSLNFCGHGTDKDPVFS

SEQ ID NO: 29381 - protein, 58 aa, Homo sapiens
VVQLLKRHLLLMDEQSTWTQEIIFYLGQRGRGMELRAFREYGPETGRSQDLITGTSGQ

SEQ ID NO: 29382 - protein, 12 aa, Homo sapiens
IPAQGAMQTAPA

SEQ ID NO: 29383 - protein, 12 aa, Homo sapiens
MMFILIRRLLHL

SEQ ID NO: 29384 - protein, 24 aa, Homo sapiens
RLRLEKKSDFLSKLLRGEWGIGRK

SEQ ID NO: 29385 - protein, 39 aa, Homo sapiens
LPPLTPKAPLSSIFQVKICLFEKKIFTNEQCIRRQLNCF

SEQ ID NO: 29386 - protein, 22 aa, Homo sapiens
KIHSMISFYDQVMNAFEYGDLE

SEQ ID NO: 29387 - protein, 9 aa, Homo sapiens
INDWMVAAF

SEQ ID NO: 29388 - protein, 55 aa, Homo sapiens
IFTAQFLGRWSHQPLPGSADFQFWNKMVKLIFPCSAPLNTTKYLGNYSADNDKGL

SEQ ID NO: 29389 - protein, 58 aa, Homo sapiens
VVQLLERHLLLMDEQSTWTQEIIFYLGQRGRGMELRAFREYGPETGRSQDLITGTSGQ

SEQ ID NO: 29390 - protein, 27 aa, Homo sapiens
VVQLLERHLLLMDEQSTWTQEIIFYLE

SEQ ID NO: 29391 - protein, 11 aa, Homo sapiens
TEDPATISCSP

SEQ ID NO: 29392 - protein, 48 aa, Homo sapiens
VMSPVIQQPRPSFDGLNIWSSLNSLYIGNLPASIHIPTSVCIPRITGR

SEQ ID NO: 29393 - protein, 23 aa, Homo sapiens
MNCILKRTLSDWLCRLPVLEQDG

SEQ ID NO: 29394 - protein, 26 aa, Homo sapiens
MRDSFALHPRQCFLRLCRLPVLEQDG

SEQ ID NO: 29395 - protein, 10 aa, Homo sapiens
VYLQETSGLE

SEQ ID NO: 29396 - protein, 14 aa, Homo sapiens
LEQMRRRWRSQEGL

SEQ ID NO: 29397 - protein, 248 aa, Homo sapiens
TAGLSRGRGAGGMALVPYEETTEFGLQKFHKPLATFSFANHTIQIRQDWRHLGVAAVVWDAAIVLSTYLEMGAVELRGRSAVELGAGTGLVGIVAALLALKSSMKPLLVHCLLFFSGAHVTITDRKVALEFLKSNVQANLPPHIQTKTVVKELTWGQNLGSFSPGEFDLILGADIIYLEETFTDLLQTLEHLCSNHSVILLACRIRYERDNNFLAMLERQFTVRKVHYDPEKDVHIYEAQKRNQKEDL

SEQ ID NO: 29398 - protein, 24 aa, Homo sapiens
RLLFKEDRKRQGYLLVCEETKVKL

SEQ ID NO: 29399 - protein, 68 aa, Homo sapiens
MDASLFRDSRSWNLHPFGFAIFTHPEPSGLHGDASKQQIPGGNDVISPFPAAQALERSKACGPRLRLS

SEQ ID NO: 29400 - protein, 158 aa, Homo sapiens
VLADASCWEPATPATPCAGTKLSVAVAGTHRVWVAASQQPRAAPPARLPAWALCPPGNENMDASLFRDSRSWNLHPFGFAIFTHPEPSGLHGDASKQQIPGGNDVISPFPAAQALEVLLPGAGGGGGGAAGLPWPPPIPTWCSPNQRSKACGPRLRLS

SEQ ID NO: 29401 - protein, 27 aa, Homo sapiens
KLFLQGYYVIPVVQVVVLALLDFFFFL

SEQ ID NO: 29402 - protein, 185 aa, Homo sapiens
LPIWAEGWFLPSTKPSQDLPASPRPTRSSAVPWCPSRPQVLHAGYLWAPRLAEPGVQPGRAPWQQSLACGCCPGPWMVSRPPRTPLSPSSWTPAMGLRASRNCSRTENAVCGCSPGHFCIVQDGDHCAACRAYATSSPGQRVQKGGTESQDTLCQNCPPGTFSPNGTLEECQHQTNRAWKSQTDL

SEQ ID NO: 29403 - protein, 275 aa, Homo sapiens
LPIWAEGWFLPSTKPSQDLPASPRPTRSSAVPWCPSRPQVLHAGYLWAPRLAEPGVQPGRAPWQQSLACGCCPGPWMVSRPPRTPLSPSSWTPAMGLRASRNCSRTENAVCGCSPGHFCIVQDGDHCAACRAYATSSPGQRVQKGGTESQDTLCQNCPPGTFSPNGTLEECQHQTKCSWLVTKAGAGTSSSHWVWWFLSGSLVIVIVCSTVGLIICVKRRKPRGDVVKVIVSVQRKRQEAEGEATVIEALQAPPDVTTVAVEETIPSFTGRSPNH

SEQ ID NO: 29404 - protein, 16 aa, Homo sapiens
TTLVPVVIAKRWCATH

SEQ ID NO: 29405 - protein, 62 aa, Homo sapiens
LWDKIPPRPLASPSGCPMLFLGCFGALAAGGSGGLTQGGLHREEGDGDRPSAGQAYSRIGPT

SEQ ID NO: 29406 - protein, 45 aa, Homo sapiens
ISFHCKFRLPCSHHCPASASLVAGTTGARHHARLIFCILVETGFH

SEQ ID NO: 29407 - protein, 73 aa, Homo sapiens
ICQPLTLRGMFNGANSISFSFSSSSSSSSSSSSSFSSSSFSSHQQEDKPRTVLKYRNFLFGICQRQDCRNKGR

SEQ ID NO: 29408 - protein, 18 aa, Homo sapiens
MVAVKAVAATMMEKRNLH

SEQ ID NO: 29409 - protein, 26 aa, Homo sapiens
RPPPPDRRALSEPKGDLTKCPFELKG

SEQ ID NO: 29410 - protein, 42 aa, Homo sapiens
TRQLKFSGTHLLLPLKNQLQSVMSSLGSHQNKETGKQRNTRD

SEQ ID NO: 29411 - protein, 73 aa, Homo sapiens
TRQLKFSGTHLLLPLKNQLQSVMSSLGSHQNKETGLKTLIPESILPHIQNEIHAQRCQEESRQTGLSRICGNI

SEQ ID NO: 29412 - protein, 80 aa, Homo sapiens
TRQLKFSGTHLLLPLKNQLQSVMSSLGSHQNKETGLKTLIPESILPHIQNEIHAQRCQEESRQTGLSRLYKKHDASICFW

SEQ ID NO: 29413 - protein, 73 aa, Homo sapiens
MKSMLRDAKKNLDRQAFLGCTRSMMPASASGDNLKKFTIGRVRWLMPVMPALREAETDGSFEVRSSRPGWPTW

SEQ ID NO: 29414 - protein, 39 aa, Homo sapiens
MWGEPLPRRPAWDVRSASTRPRPCLGGEERLCPAAPSEK

SEQ ID NO: 29415 - protein, 15 aa, Homo sapiens
KVRKRLRNRMVAVSA

SEQ ID NO: 29416 - protein, 12 aa, Homo sapiens
VLSESCAVSTQG

SEQ ID NO: 29417 - protein, 33 aa, Homo sapiens
IQRSTNPPSIMVSRGYRRSFLGTLVTLSVCQRK

SEQ ID NO: 29418 - protein, 10 aa, Homo sapiens
MEQQLAAHLY

SEQ ID NO: 29419 - protein, 22 aa, Homo sapiens
MEVQDSKIYFLPFPAELPETSE

SEQ ID NO: 29420 - protein, 11 aa, Homo sapiens
RNPAKPKSPSM

SEQ ID NO: 29421 - protein, 31 aa, Homo sapiens
LGPSSSSRDCAKAMQQNAGGLCKAHGGDGVS

SEQ ID NO: 29422 - protein, 34 aa, Homo sapiens
LKFQLMDSILPVKTSSPENCASWHPAVPKYYLTH

SEQ ID NO: 29423 - protein, 22 aa, Homo sapiens
MLGKEAWSRQYSGRTRQKCLPW

SEQ ID NO: 29424 - protein, 10 aa, Homo sapiens
MRRIRASLWY

SEQ ID NO: 29425 - protein, 19 aa, Homo sapiens
LVLASLGLWWPLHQTSLCL

SEQ ID NO: 29426 - protein, 31 aa, Homo sapiens
LWGPRGKMKREMPRPVGDARTSEALLRHGGW

SEQ ID NO: 29427 - protein, 11 aa, Homo sapiens
KMNWREKAFDL

SEQ ID NO: 29428 - protein, 10 aa, Homo sapiens
KMNWREVCFA

SEQ ID NO: 29429 - protein, 84 aa, Homo sapiens
IVSNSRRSGNRLFRCPGALQTNKQQKVNGGCEGRELEAGSGKRGSCGRQGGPGGDANIRESPGHSSVWRTHCSKCSSLQMVRRW

SEQ ID NO: 29430 - protein, 179 aa, Homo sapiens
LHLGPASVAMDRGPWSSLILRGCLHGTRTDSNTGSSFPLPDISRRQHPCMPSVYNPSLKKDTENKLLRKPYIELQSARGGTGASHTSGRRLQPPGGPRVVGVAGGTTALRADTRGTKRCLDKGWCPAQGAQRGHAMADKAQDVKNSPWTPRQKPRTVCRQISTQHPSWLPVPRTLYLFF

SEQ ID NO: 29431 - protein, 32 aa, Homo sapiens
LTPSSVPFFSPGLHPREGRTGAKGCREAADFH

SEQ ID NO: 29432 - protein, 15 aa, Homo sapiens
IVSQKIGPALSFRDN

SEQ ID NO: 29433 - protein, 13 aa, Homo sapiens
IRKKVNKRSRIWA

SEQ ID NO: 29434 - protein, 24 aa, Homo sapiens
KSEVKMTKKRRVEKISVKVSEAKL

SEQ ID NO: 29435 - protein, 20 aa, Homo sapiens
IFRQLMKRSARGGHWRRSVT

SEQ ID NO: 29436 - protein, 28 aa, Homo sapiens
KRAVSANPASLCGGLCHRAMGPEVPGPG

SEQ ID NO: 29437 - protein, 30 aa, Homo sapiens
KIPSVAARLFLGTCAGMRPACVNTPSEEWS

SEQ ID NO: 29438 - protein, 8 aa, Homo sapiens
LNTLYLRN

SEQ ID NO: 29439 - protein, 19 aa, Homo sapiens
RISERDLDRLSQKSPRLCR

SEQ ID NO: 29440 - protein, 14 aa, Homo sapiens
MELEEKQGCEDKTY

SEQ ID NO: 29441 - protein, 40 aa, Homo sapiens
IILTRKPTGKKNEIPYLRIFRWCSPFIPVLWESYMQEWHL

SEQ ID NO: 29442 - protein, 26 aa, Homo sapiens
MMSQGWPRSSWAELLKAQRPGPDSSA

SEQ ID NO: 29443 - protein, 53 aa, Homo sapiens
LMPKLSDFGGSPPRAVLHGCPDSKCSYRLCVWIARPSPGPLRSAWRMPPPGGQ

SEQ ID NO: 29444 - protein, 45 aa, Homo sapiens
VACSILEGKLKTCSRKHEQKQMMKMSILLDVDNITINYGEKYIFG

SEQ ID NO: 29445 - protein, 20 aa, Homo sapiens
LIQMQRPGCGPSPVPGGWLE

SEQ ID NO: 29446 - protein, 13 aa, Homo sapiens
MGWVCEFFLEERN

SEQ ID NO: 29447 - protein, 11 aa, Homo sapiens
MDRVVPVLGGY

SEQ ID NO: 29448 - protein, 469 aa, Homo sapiens
LPVPGGRGAGEAGPRRTQQVEPGVPGRAPPAHHAALCHLSRPQAKILSMMEDNKQLALRIDGAVQSASQEVTNLRAELTATNRRLAELSGGGGPGPGPGAAASASAAGDSAATNMENPQLGAQVLLREEVSRLQEEVHLLRQMKEMLAKDLEESQGGKSSEVLSATELRVQLAQKEQELARAKEALQAMKADRKRLKGEKTDLVSQMQQLYATLESREEQLRDFIRNYEQHRKESEDAVKALAKEKDLLEREKWELRRQAKEATDHATALRSQLDLKDNRMKELEAELAMAKQSLATLTKDVPKRHSLAMPGETVLNGNQEWVVQADLPLTAAIRQSQQTLYHSHPPHPADRQAVRVSPCHSRQPSVISDASAAEGDRSSTPSDINSPRHRTHSLCNVRPAAAGPGPLGPAQKLQGRGWRGEAILAVSSRPPREHSGECISCSVLSFCKKRWMWGEKGMRPVCSLCPGG

SEQ ID NO: 29449 - protein, 10 aa, Homo sapiens
MLEDTCGNLD

SEQ ID NO: 29450 - protein, 13 aa, Homo sapiens
MRKKMETFVLCVQ

SEQ ID NO: 29451 - protein, 10 aa, Homo sapiens
MPRDGAKDKR

SEQ ID NO: 29452 - protein, 18 aa, Homo sapiens
MLSPYTTKCEMLPVTSWP

SEQ ID NO: 29453 - protein, 28 aa, Homo sapiens
MPTGMYATFQKIGVDNSLQYCTVVKEEC

SEQ ID NO: 29454 - protein, 75 aa, Homo sapiens
MAPLEPRSLLSLTPFTPKTLTKPHEPQLRSGGASCAWSHLDGGGRGGILCIRSDFVAPHSLLLQVLWKEMLPWSW

SEQ ID NO: 29455 - protein, 28 aa, Homo sapiens
RAESCSIESKMFRPCCLRSSDAHSIPYR

SEQ ID NO: 29456 - protein, 57 aa, Homo sapiens
MCLPPALHTSLSPQPGNPCPPPAGRTAPGAPCQPLPRLGDGRRDRIRAAPTEWDPRG

SEQ ID NO: 29457 - protein, 40 aa, Homo sapiens
MFFSLGFLLLFSPPSHLPFSPTPPPKKATSSFRGTIIFFN

SEQ ID NO: 29458 - protein, 26 aa, Homo sapiens
MPFSLLTLTSGTLLVKKNYGMTLTIL

SEQ ID NO: 29459 - protein, 14 aa, Homo sapiens
KSTADASGSRGHQL

SEQ ID NO: 29460 - protein, 11 aa, Homo sapiens
MHPARGAISFE

SEQ ID NO: 29461 - protein, 39 aa, Homo sapiens
MPQRRLMPCRWSLQMEPRDLSPTHLFACLLVRFSEKFLA

SEQ ID NO: 29462 - protein, 9 aa, Homo sapiens
IKPKVIKRP

SEQ ID NO: 29463 - protein, 12 aa, Homo sapiens
IHDAGRIASFKA

SEQ ID NO: 29464 - protein, 9 aa, Homo sapiens
RKLGRRKER

SEQ ID NO: 29465 - protein, 9 aa, Homo sapiens
MSAWLFLLF

SEQ ID NO: 29466 - protein, 24 aa, Homo sapiens
LDVFREPSLSSCQHSSQYSFQSTV

SEQ ID NO: 29467 - protein, 13 aa, Homo sapiens
MVVGTCNPSYLEG

SEQ ID NO: 29468 - protein, 26 aa, Homo sapiens
LLVDLRARWNRRELCCCNVQPTRAYW

SEQ ID NO: 29469 - protein, 26 aa, Homo sapiens
MQSQRYSNVPGIPDDSLPLSYSTTNQ

SEQ ID NO: 29470 - protein, 21 aa, Homo sapiens
IQVFLMTVCLYLTEQLVAIYH

SEQ ID NO: 29471 - protein, 22 aa, Homo sapiens
IPDDSLPLSYSKLFFEFYGPII

SEQ ID NO: 29472 - protein, 7 aa, Homo sapiens
VSVFTPG

SEQ ID NO: 29473 - protein, 8 aa, Homo sapiens
MVGICLNI

SEQ ID NO: 29474 - protein, 8 aa, Homo sapiens
RSDDGWRG

SEQ ID NO: 29475 - protein, 11 aa, Homo sapiens
LVGRGELVGRV

SEQ ID NO: 29476 - protein, 14 aa, Homo sapiens
KAKTPGPVDVTSRT

SEQ ID NO: 29477 - protein, 12 aa, Homo sapiens
MTFQETFTAKRN

SEQ ID NO: 29478 - protein, 36 aa, Homo sapiens
KLPFSVVLMFLSAGPIVPLLRNVSPVQGQRLKRLLY

SEQ ID NO: 29479 - protein, 10 aa, Homo sapiens
IEMFAKISNR

SEQ ID NO: 29480 - protein, 11 aa, Homo sapiens
LPGIWLLTSHS

SEQ ID NO: 29481 - protein, 7 aa, Homo sapiens
LFLREIT

SEQ ID NO: 29482 - protein, 12 aa, Homo sapiens
ISMHIGERSAAT

SEQ ID NO: 29483 - protein, 12 aa, Homo sapiens
ISSLGPKPVPTW

SEQ ID NO: 29484 - protein, 17 aa, Homo sapiens
MWKELKCSNLKMAPASQ

SEQ ID NO: 29485 - protein, 38 aa, Homo sapiens
MRSPLSASALLLWSSSVARAFSSPSLLMAVPSPTCSRY

SEQ ID NO: 29486 - protein, 14 aa, Homo sapiens
IPAGLKLEHSKLLR

SEQ ID NO: 29487 - protein, 8 aa, Homo sapiens
MKNRTFRN

SEQ ID NO: 29488 - protein, 501 aa, Homo sapiens
LAADLDVVSRTGGRWQTSRLGVGAPGLPCHILPALSSGRWTVPAPAPSLWRDIVGRGSGPGLGGPRESAASGPPPQRRPARPLELAWPGVALPRPTGPLASDGFVFPGPAGRGALAALAPAAVLSLSLQTGGPRRAESPGGSCGRGRRGLEWVVAPSWDAPPSTISPGLQGPRAYTASSHAVLRNPCWPQNTSALPPVQPCLAGGPSSTAMVWKKLGSRNFSSCPSGSIQWIWDVLGECAQDGWDEASVGLGLISILCFAASTFPQFIKAYKTGNMDQALSLWFLLGWIGGDSCNLIGSFLADQLPLQTYTAVYYVLADLVMLTLYFYYKFRTRPSLLSAPINSVLLFLMGMACATPLLSAAGPVAAPREAFRGRALLSVESGSKPFTRQEVIGFVIGSISSVLYLLSRLPQIRTNFLRKSTQGISYSLFALVMLGNTLYGLSVLLKNPEEGQSEGSYLLHHLPWLVGSLGVLLLDTIISIQFLVYRRSTAASELEPLLPS

SEQ ID NO: 29489 - protein, 37 aa, Homo sapiens
MNQFPKLKPCWQDYELYKLNWFLKKMIKPNIKPCSKL

SEQ ID NO: 29490 - protein, 82 aa, Homo sapiens
MSAWNQNHWLSLAACFLLSLHMRSQPSILLDARSNCTHGKSELPLSLSLSLVVIRIHQNPCLDLSLAEAALFPTERVSLSSC

SEQ ID NO: 29491 - protein, 70 aa, Homo sapiens
LRQLYFLQKEFLCPLVRTISLLLWAFPRAYFSSAGCLFFFFFFFLHCVTCFNIYIFYVSKEVINFNFQNS

SEQ ID NO: 29492 - protein, 27 aa, Homo sapiens
MLSAKFTSELRGSSKCWLKFIPRLVCK

SEQ ID NO: 29493 - protein, 15 aa, Homo sapiens
MSYDLKKIQMTHCEC

SEQ ID NO: 29494 - protein, 36 aa, Homo sapiens
MEKSKCSSGLNMFWVFLFIDYNTFPIKILSCHAEEG

SEQ ID NO: 29495 - protein, 27 aa, Homo sapiens
RLLPVCPAHIPEPLKPQRHENDVVSSH

SEQ ID NO: 29496 - protein, 13 aa, Homo sapiens
LGFTMLARMVSIS

SEQ ID NO: 29497 - protein, 17 aa, Homo sapiens
KRMEKKTGSSRDMERKV

SEQ ID NO: 29498 - protein, 10 aa, Homo sapiens
KLEVESEVSG

SEQ ID NO: 29499 - protein, 14 aa, Homo sapiens
VHFLENVVESEVSG

SEQ ID NO: 29500 - protein, 11 aa, Homo sapiens
IRGFWLTRWVL

SEQ ID NO: 29501 - protein, 13 aa, Homo sapiens
MVACACSPSYPGG

SEQ ID NO: 29502 - protein, 33 aa, Homo sapiens
KRMAGAWDVEAAMNCDYPTALQPGQKSERPCLK

SEQ ID NO: 29503 - protein, 30 aa, Homo sapiens
LGRKKRRLHREIVCVALKEQRDASLEVTYS

SEQ ID NO: 29504 - protein, 14 aa, Homo sapiens
MPEIMNSSKARNLF

SEQ ID NO: 29505 - protein, 11 aa, Homo sapiens
MHLFWFYKKET

SEQ ID NO: 29506 - protein, 38 aa, Homo sapiens
LYWWVTWTTVAVSTLRSFTSWAPVSGPRWPSRPSSRSL

SEQ ID NO: 29507 - protein, 36 aa, Homo sapiens
VLQAAAHPGEVSKGHLCLVRGKTGGAQKALVWNSES

SEQ ID NO: 29508 - protein, 170 aa, Homo sapiens
RHTQGLGRAGGHTAWLSCSWSPASPRRPGGSISQEARSPPGGWAQPRQMDEKTKKAPENKPCANWLLLYWLSAEEMALSLTRAVAGGDEQVAMKCAIWLAEQRVPLSVQLKPEVSPTQDIRFLMVQNGHSSSIQPSHHRRKGRKTPLHTLLKSIAQKLYTLLPLIPVDQN

SEQ ID NO: 29509 - protein, 70 aa, Homo sapiens
ISWTVLYRTKHKKGQSEEIQKKRTRRAVKFQRAITGASLADIMAKRDQKPEVRKAQREQAIRAAKEAKKG

SEQ ID NO: 29510 - protein, 19 aa, Homo sapiens
VPTSRMSLLDFEISNCLPA

SEQ ID NO: 29511 - protein, 13 aa, Homo sapiens
TPPHPISRNLQTS

SEQ ID NO: 29512 - protein, 48 aa, Homo sapiens
ILIFPTLSVRSPPPLDARAPGLVGCAAPRTASHQPAPSLSCSTLICTP

SEQ ID NO: 29513 - protein, 16 aa, Homo sapiens
KTASGSDTSTFVKWVR

SEQ ID NO: 29514 - protein, 39 aa, Homo sapiens
LEDLRRKRRRFYARLVIFRRHFHILSIVLCAFYSSLLCI

SEQ ID NO: 29515 - protein, 9 aa, Homo sapiens
KRGNNFPRG

SEQ ID NO: 29516 - protein, 78 aa, Homo sapiens
RQQGDQVLPLTKSLLGIMKRIRTLTFLAVHFPPVKVMVQFSIHIHIRGLACCTSKKPDCCSLLRTGMQQSGRGCLILS

SEQ ID NO: 29517 - protein, 29 aa, Homo sapiens
MHSECEGHPGAPGSGPCGHRAGELGGAAL

SEQ ID NO: 29518 - protein, 55 aa, Homo sapiens
LRQENRLNPEGGGCSEPRSRHCTPAWQQSETLAQKKKKKKKKLERDALPPACTRK

SEQ ID NO: 29519 - protein, 56 aa, Homo sapiens
LHPSLATERDSGSKKKKKKKKIGEGRSSACLYPEVTLCTSPPEEVTTGVPLTGREG

SEQ ID NO: 29520 - protein, 20 aa, Homo sapiens
VEDSQSGCDRLDQTLGFLNW

SEQ ID NO: 29521 - protein, 27 aa, Homo sapiens
VEDSQSGCDRLDQTLGFLNWNEMQITL

SEQ ID NO: 29522 - protein, 26 aa, Homo sapiens
VEDQLACGLKLTFDSSFSPNTGGEKC

SEQ ID NO: 29523 - protein, 16 aa, Homo sapiens
MLLLKRYIEPCLVNLQ

SEQ ID NO: 29524 - protein, 22 aa, Homo sapiens
LLFPSSQLCLGRRLCGSPETFG

SEQ ID NO: 29525 - protein, 8 aa, Homo sapiens
TGRSACVL

SEQ ID NO: 29526 - protein, 14 aa, Homo sapiens
IENEKQAKTSIGEV

SEQ ID NO: 29527 - protein, 15 aa, Homo sapiens
KLVKNHIKKLLKGLV

SEQ ID NO: 29528 - protein, 17 aa, Homo sapiens
KAFGRVRRIWKALNIVA

SEQ ID NO: 29529 - protein, 9 aa, Homo sapiens
KSPGASAIW

SEQ ID NO: 29530 - protein, 37 aa, Homo sapiens
RKKDSRKERVQFGDEGSRRLGLATTRRRRAGVVRRGS

SEQ ID NO: 29531 - protein, 10 aa, Homo sapiens
VFPNAWSSDC

SEQ ID NO: 29532 - protein, 91 aa, Homo sapiens
ISPVPFPLLLILIKKKNNSNCKLATIPYVPHSWHHEGGRRSQADSHHHQDGKSRSGAFPLPGYGMCRCPTINSKQQRNDVSSIKSYFQWFH

SEQ ID NO: 29533 - protein, 69 aa, Homo sapiens
ITGAKPYLGSKTSKRTQPQTHPGARGQAVCETSPGGTQACTGRYTTFLGIRSPPGRSCGSPQPQDPAGV

SEQ ID NO: 29534 - protein, 24 aa, Homo sapiens
IHLPPPLPFFFLELLRSPVGIPAD

SEQ ID NO: 29535 - protein, 39 aa, Homo sapiens
IGKFQISYNWRVLKIDGIVALCICFGFTKRKLDRGSCCT

SEQ ID NO: 29536 - protein, 12 aa, Homo sapiens
LGSFKSAITGEC

SEQ ID NO: 29537 - protein, 15 aa, Homo sapiens
LDVCSLEMTRAWGVG

SEQ ID NO: 29538 - protein, 21 aa, Homo sapiens
LLISSLSMISVMEIGLKRLLF

SEQ ID NO: 29539 - protein, 29 aa, Homo sapiens
MHILSPHSYFKNHRSDSAWPEGTLCWWLY

SEQ ID NO: 29540 - protein, 22 aa, Homo sapiens
MFVVHFCGGGCGDISQESEWYC

SEQ ID NO: 29541 - protein, 42 aa, Homo sapiens
MVLLKETSMIASVLKALKPSLRWVPLGFTLYWQFIGKMDIRS

SEQ ID NO: 29542 - protein, 10 aa, Homo sapiens
LLEPGRWRLY

SEQ ID NO: 29543 - protein, 51 aa, Homo sapiens
MGNPRNQKTNCPSPQLEVAPLQKQASNSLLRKKPDESAPFVCMPSPIRVLL

SEQ ID NO: 29544 - protein, 17 aa, Homo sapiens
RPRSSSPDQSPRSGPRP

SEQ ID NO: 29545 - protein, 60 aa, Homo sapiens
VVFFSFRFMLHVKLSSFVTMDLWSWDNLYGKQKARTPVILGRNNSMLMQKIMQCATELQR

SEQ ID NO: 29546 - protein, 80 aa, Homo sapiens
LQASACLPARRSPLVAAAGAHSPGFSSHGLEMVVNVARRSRAFQPGGPELRKAPSAVRGAGARGGRALLSLRTAQRCALG

SEQ ID NO: 29547 - protein, 30 aa, Homo sapiens
LVEAAMSLDHATALQPGQQNKTLSQTKKCM

SEQ ID NO: 29548 - protein, 51 aa, Homo sapiens
TPPGVEGQPAARREMVGWAPAGPRRRCPEPGLGTPPPAPTERSSASSSPHP

SEQ ID NO: 29549 - protein, 14 aa, Homo sapiens
IQWAGADHPRGQQH

SEQ ID NO: 29550 - protein, 10 aa, Homo sapiens
LEEPKRKLMP

SEQ ID NO: 29551 - protein, 81 aa, Homo sapiens
LYKVLVCVLPLCLLSSFLSLWLASLEALGRCPCCASVCFMFSGEVIMPFFLSSYFRYPIECFLLPGRVRKLCVSGDHGYHS

SEQ ID NO: 29552 - protein, 146 aa, Homo sapiens
LRRKQLVAGDIVLDKLGERLAILLKVRDMVSSHVERVFQIYEQHADTVGIDAVLQPSAVSPSVADMLEWLQDIERHYRKSKVPEEKVSSFVYPVGRLGKHTSFAQGLGPNFKRRTPRSCTRYPIECFLLPGRVRKLCVSGDHGYHS

SEQ ID NO: 29553 - protein, 88 aa, Homo sapiens
LNLRFLGFPMPPGGICEPLGIAPPHLPPAGGTVAISITWTGLPCGAPVFLSPGALPALAELWCSLMRNVGTQARWAAGVASGRVGGLN

SEQ ID NO: 29554 - protein, 44 aa, Homo sapiens
MVKTTKKTMAFIWTDKMKEREKAVVCRQIWFGICLLMTPDMMSF

SEQ ID NO: 29555 - protein, 195 aa, Homo sapiens
LTWKHPEALPGPISKYVVEVQVAGGAGDPLWIDVDRPEETSTIIRGLNASTRYLFRMRASIQGLGDWSNTVEESTLGNGLQAEGPVQESRAAEEGLDQQLILAVVGSVSATCLTILAALLTLVCIRRSCLHRRRTFTYQSGSVSDPPRPWVHACSPCLCFYLCTHNTLYTLCVCVCVCLCCRYKITLNNVQGYKI

SEQ ID NO: 29556 - protein, 46 aa, Homo sapiens
LLQSCLFQKEAFWPAQFLFPSSCSELILRPHCTANLLPACSSPKRL

SEQ ID NO: 29557 - protein, 25 aa, Homo sapiens
VRTLVMDSWGTATSGGASHPHRVRN

SEQ ID NO: 29558 - protein, 99 aa, Homo sapiens
VRSCGFLGQLGRASLSLSSCVCPLDNSGSVWRIATLSDGRLSCILCPVSSPPDLMLGVHRVDPGLPGRLIIQARDFPPESEALRPGRGRQTCSGSTARP

SEQ ID NO: 29559 - protein, 18 aa, Homo sapiens
MCLSSGQQWLCMADCDPE

SEQ ID NO: 29560 - protein, 59 aa, Homo sapiens
LRAEAARGSGGRFQVCGKENFMSKCALVGFSASWAEPLFLCPHVSVLWTTVALYGGLRP

SEQ ID NO: 29561 - protein, 21 aa, Homo sapiens
LWAVVRGKRVATSGETENSAT

SEQ ID NO: 29562 - protein, 42 aa, Homo sapiens [sequence omitted]

SEQ ID NO: 29563 - protein, 54 aa, Homo sapiens
LDTLRESGKAGASLLPTLDLAAAPKRDSCLASAGTAPGPFLHPDLRLLRSDQLP

SEQ ID NO: 29564 - protein, 95 aa, Homo sapiens
LFGVLQQCLRSRVSPSLPPRKPGLFPRSLGLQHHACCSRQRAGSHRLCGSWLQRLWSCRASFCICSTARPSPSCSPEQLGGSVGGRRGMPVGLFH

SEQ ID NO: 29565 - protein, 560 aa, Homo sapiens
LEGERGRAGPPGGAAEPGDTPPCLPQSPAPSPPARKTHSPQRQRGRARAAAGAEPESGGGGGSGTMTLGSCCCEIMSSESSPAALSEADADIDVVGGGSGGGELPARSGPRAPRDVLPHGHEPPAEEAEADLAEDEEESGGCSDGEPRALASRGAAAAAGSPGPGAAAARGAAGPGPGPPSGGAATRSPLVKPPYSYIALITMAILQSPKKRLTLSEICEFISGRFPYYREKFPAWQNSIRHNLSLNDCFVKIPREPGNPGKGNYWTLDPESADMFDNGSFLRRRKRFKRQPLPPPHPHPHPHPELLLRGGAAAAGDPGAFLPGFAAYGAYGYGYGLALPAYGAPPPGPAPHPHPHPHAFAFAAAAAAAPCQLSVPPGRAAAPPPGPPTASVFAGAGSAPAPAPASGSGPGPGPAGLPAFLGAELGCAKAFYAASLSPPAAGTAAGLPTALLRQGLKTDAGGGAGGGGAGAGQRPSFSIDHIMGHGGGGAAPPGAGEGSPGPPFAAAAGPGGQAQVLAMLTAPALAPVAGHIRLSHPGDALLSSGSRFASKVAGLSGCHF

SEQ ID NO: 29566 - protein, 148 aa, Homo sapiens
VGKQNRTRKYATMKQILSLRDQRLKEKDRLKPKKKEKKDPNTLKEREVPQHPSHLFFQYNTQLGPPYHILIDTNFINFSIKAKLDLMQSMMDCLYAKCIPCITDCVMAEIEKLGQKYRVALRITKDPRFELLPCAHQGTYADDCLVQK

SEQ ID NO: 29567 - protein, 36 aa, Homo sapiens
VMNGNFLTFQATTSERKWNFPEAQAGGPRHKLLICM

SEQ ID NO: 29568 - protein, 39 aa, Homo sapiens
VMNGNFLTFQATTSERKWNFPEAQAGGPRHKLLIWLEME

SEQ ID NO: 29569 - protein, 122 aa, Homo sapiens
LDKYCGGTAMSGGEQKPERYYVGVDVGTGSVRAALVDQSGVLLAFADQPIKNWEPQFNHHEQSSEDIWAACCVVTKVVMEPEGTGDCITPRTPPKLTKAFKSRFKRIQYLPLRTLLQAGLCL

SEQ ID NO: 29570 - protein, 63 aa, Homo sapiens
VEEARMCGQCTRSARPPSWEPQEPAWCGRHTEPNPCLSAAAWEGSAGLTRGRSTRGGVPRGNN

SEQ ID NO: 29571 - protein, 63 aa, Homo sapiens
LASVLIPGKTPAEMSFSPSPNQTTQVLPALSRLDAGVFSCMYFFVRPQKASAGVPEGQKMAID

SEQ ID NO: 29572 - protein, 39 aa, Homo sapiens [sequence omitted]

SEQ ID NO: 29573 - protein, 349 aa, Homo sapiens
LLLPARGPGRKVRGAGGRRRRTAAQVGPRSRPCKMPLKLRGKKKAKSKETAGLVEGEPTGAGGGSLSASRAPARRLVFHAQLAHGSATGRVEGFSSIQELYAQIAGAFEISPSEILYCTLNTPKIDMERLLGGQLGLEDFIFAHVKGIEKEVNVYKSEDSLGLTITDNGVGYAFIKRIKDGGVIDSVKTICVGDHIESINGENIVGWRHYDVAKKLKELKKEELFTMKLIEPKKAFEIELRSKAGKSSGEKIGCGRATLRLRSKGPATVEEMPSETKAKAIEKIDDVLELYMGIRDIDLATTMFEAGKDKVNPDEFAVALDETLGDFAFPDEFVFDVWGVIGDAKRRGL

SEQ ID NO: 29574 - protein, 131 aa, Homo sapiens
LAAEGRGLQTVHIKENVATLVILYIADQKACEAVEMRARVERKMAQKEKGKYEEKLREMAQKARERRAGIKTHVEKEDREARERNEIRHDRRKERQHDQNLSRAAPDKRSKLQRNENGDISEVIALCVPNP

SEQ ID NO: 29575 - protein, 100 aa, Homo sapiens
LTSVQKTLCDIQVLSLSRVPAIEDMEISLPNIHYFNIDMSKMGLINKEEVRGPHRKAVIGLRVRQEMGGVQSSKPYKMLEAIHKQAPAWKITWDKNNEII

SEQ ID NO: 29576 - protein, 88 aa, Homo sapiens
MLQQMQRKNEQMMEQKERSYQEHLKQLTEKMESDRVQLLEEQERTLALKLQEQERLLKERFENVSRRIQNEIQNLQRTMIQPRTCTIN

SEQ ID NO: 29577 - protein, 50 aa, Homo sapiens
MESDRVQLLEEQERTLALKLQVSNCITLRFLFFCFLSILPDHRLTVAERT

SEQ ID NO: 29578 - protein, 69 aa, Homo sapiens
MRCEKILGNVPCKAWAFQVLFWIRINSSLQASLSGIQLVPNPTWCSSACVFESRGLFESEALCIEISIL

SEQ ID NO: 29579 - protein, 135 aa, Homo sapiens
LHFLEDEKYEEVMAVLGSFPYVTMNIKSQVLDDEDSNNITVGSLVTVLVKLTRQTMAEVFEKEQSFCAAEEQPAEDGQGETNKNRTKRGWQQKSKGPKKTAKSKKKKPLKKKTCTCAITTVKATETKAGKWSCWE

SEQ ID NO: 29580 - protein, 94 aa, Homo sapiens
LLPWRRNGGKDWLSEVGWKLQNRASWECLLGRQEVERHRKGGAATRGLSLAPGAHFAGGTFSRLLIQLMEKDRCTLLGLEKKTKMSKRDAPSVL

SEQ ID NO: 29581 - protein, 79 aa, Homo sapiens
VPRKGLWGSPPRAPHALASHRGASFCLHVAETGLEVLTRIRAAAVAPGMTWKRKRPARILEFRGFRGLRLYGKQCINQT

SEQ ID NO: 29582 - protein, 57 aa, Homo sapiens
MFSFTLVSNPSECVHFCFFRDALYIPHPTLPSLHTPPQRSFTLYFNYLRVIRAGVVE

SEQ ID NO: 29583 - protein, 138 aa, Homo sapiens
LAGDAEVVRGLAVLQPLQQPQEAAHLPPQVRENTHTASERGNASSSQKEKVLPEAGAGEDSPGRNMDTALEELQLPPNAKGPVKQISPRSPQAAETVGRPAGPAGLRRPPDKQPSDHSYALLDLDSLKKKTLPHSEGK

SEQ ID NO: 29584 - protein, 14 aa, Homo sapiens
MIKSAFFPHVEIVQ

SEQ ID NO: 29585 - protein, 337 aa, Homo sapiens
LGRACLHHRYSHPFPVLGSHIPGSTFVPCSLHPHTGPEAPHPHAPGRLIHRCPSGLTQTLQPPPRRHSLILGRSVGADGGQNPFPCFMPGPVSPPARSPTSQAPHHPSTAPVCLHAPGLAVGLDPEGYGNPDFCWLSIYDTLIWSFAGPVAFAVSMSVFLYILAARASCAAQRQGFEKKGPVSGLQPSFAVLLLLSATWLLALLSVNSDTLLFHYLFATCNCIQVPGPACGEGRHLGCGCLNMHRPLLPLACQGPFIFLSYVVLSKEVRKALKLACSRKPSPDPALTTKSTLTSSYNCPSPYADGRLYQPYGDSAGSLHSTSRSGKSQPSYIPFLLR

SEQ ID NO: 29586 - protein, 95 aa, Homo sapiens
MPGPVSPPARSPTSQAPHHPSTAPVCLHAPGLAVGLDPEGYGNPDFCWLSIYDTLIWSFAGPVAFAVSMSVFLYILAARASCAAQRQGFEKKGPV

SEQ ID NO: 29587 - protein, 312 aa, Homo sapiens
MGGWRRGGGAHACWTQASQLLGVEEHTLWLTWGPAWIRSCKGPTAGTRIPGERRDWDPGQGARLTPPAWSHLPREESALNPGQGPPGLGDPGSLFLEGQDQQHDPDTDSDSDLSLEDDQSGSYASTHSSDSEEEEEEEEEEAAFPGEQGWDSLLGPGAERLPLHSTPKDGGPGPGKAPWPGDFGTTAKESSGNGAPEERLRENGDALSREGSLGPLPGSSAQPHKGILKKKCLPTISEKSSLLRLPLEQCTGSSRGSSASEGSRGGPPPRPPPRQSLQEQLNGVMPIAMSIKAGTVDEDSSGSEFLFFNFLH

SEQ ID NO: 29588 - protein, 70 aa, Homo sapiens
VWPGGRDGVQPLGGLTWAQSCLRASPGDSGWHLEDKWAELAQLPYYAVPTNHGALRGGPPLLGSTRRSPA

SEQ ID NO: 29589 - protein, 110 aa, Homo sapiens
LSNLLWPLRHVLFLTPSWNWLSSSKDQVLFLFLPDSTPAPCEERVNIFVLFICFLCWDGFVSSPGGLIWPSQAGCSQQPWLGGLTPFPLPQAIISPPLLPSPQFCRLLFI

SEQ ID NO: 29590 - protein, 462 aa, Homo sapiens
LRRKGLGGEGAGERIPWEQSLCLLLCELCRSLLSFPSLCPLLIALQGVCPGALLFELGRFKDAPTLTPQQSHSPGIPFGPSRSRASSESELDDEGPCGGDGDPGLFPFPMPRGGTQASSEESEEEGTSDDLHPPPDCHYATRPPRPQAFCTFGSRLVSPGCYVFSRRLDRFCSALSSMLERHLSTHMWKKIPPAAEPPAHLVNSPLSAPLSPSSTGTCPRLPGPTLRPACPASMPPTKDNLVPSYPAGSPSVAAACSQAECMGGSQAITSPLPANTPSPSFSKLPPSKASKSSKGKDGVEVEAPSRKRKLSPGPTTLKRTCILEPTGKGKPSGCRGLSAKTKTALSMGLNGTMGPRVKRAGPLDCRGSPHQLPTPVKASQLENRGAAGHPAKALPTNCLSEEEVAKKRKNLATYCRPVKAKHCQAGAPADVACSVRRKKPGPALAFEEKCSTLKVPARLPED

SEQ ID NO: 29591 - protein, 458 aa, Homo sapiens
LRRKGLGGEGAGERIPWEQSLCLLLCELCRSLLSFPSLCPLLIALQGVCPGALLFELGRFKDAPTLTPQQSHSPGIPFGPSRSRASSESELDDEGPCGGDGDPGLFPFPMPRGGTQASSEESEEEGTSDDLHPPPDCHYATRPPRPQAFCTFGSRLVSPGCYVFSRRLDRFCSALSSMLERHLSTHMWKKIPPAAEPPAHLVNSPLSAPLSPSSTGTCPRLPGPTLRPACPASMPPTKDNLVPSYPAGSPSVAAACSQAECMGGSQAITSPLPANTPSPSFSKLPPSKASKSSKGKDGVEVEAPSRKRKLSPGPTTLKRTCILEPTGKGKPSGCRGLSAKTKTALSMGLNGTMGPRVKRAGPLDCRGSPHQLPTPVKASQLENRGAAGHPAKALPTNCLSEEEVAKKRKNLATYCRPVKAKHCQAGAPADVACSVRRKKPGPALAFEEKCSTLKSKAH

SEQ ID NO: 29592 - protein, 100 aa, Homo sapiens [sequence omitted]

SEQ ID NO: 29593 - protein, 117 aa, Homo sapiens
MGKDEREGNSPSFFNPEEAATVTSYLKLLLAPSSKKGKARLSPRSVGVISPYRKQVEKIRYCITKLDRELRGLDDIKDLKNTLQAPALSRIQPSCFSFHSLPPIPFPWAVSQHWFTH

SEQ ID NO: 29594 - protein, 77 aa, Homo sapiens
MFDPTRQFCLHIFTETSFYYLKSSHWADLGNMKIKRVGKHACLMSQKKRQKPVVWVEQILLRMYKPGKVVLAPHLVS

SEQ ID NO: 29595 - protein, 39 aa, Homo sapiens
LGNMKIKRVGKHACLMSQKKRQKPVVWVEQILLRMDLTV

SEQ ID NO: 29596 - protein, 35 aa, Homo sapiens
LGNMKIKRVGKHACLMSQKKRQKPVVWVEQILLRM

SEQ ID NO: 29597 - protein, 317 aa, Homo sapiens [sequence omitted]

SEQ ID NO: 29598 - protein, 96 aa, Homo sapiens
LSFSIKSTVDFCPPDVHIRTSMRCFLCAEHCHLLRLWATATSASSNSAMWSTSGVFGLLRELHHTSKEKQYKCDCKNGRGPSTEILEISCPLSGHV

SEQ ID NO: 29599 - protein, 73 aa, Homo sapiens
LVAGKSWAKVHLMFDENGKTICEPYPSMAEGIIGWRDLPSAGDEILEVEPELRACEVLTGGSMNKNRRKVNRI

SEQ ID NO: 29600 - protein, 26 aa, Homo sapiens
VSSPIRRQKGRKLESSSGEQQLGGFI

SEQ ID NO: 29601 - protein, 172 aa, Homo sapiens
LNEQSPTRCTLEAGAMTFHYIIEQGVCDLVLCEAAFPKTLAFAYLEDLHSEFDEQHGKKVPTVSRPYSFIEFDTFIQKTKKLYIDSCARRNLGSINTELQDVQRIMVANIEEVLQRGEALSALDSKANNLSSLSKKYRQDAKYLNMHSTYAKLAAVAVFFIMLIVYVRFWWL

SEQ ID NO: 29602 - protein, 134 aa, Homo sapiens
LSRGCVLAFAYLEDLHSEFDEQHGKKVPTVSRPYSFIEFDTFIQKTKKLYIDSLGSINTELQDVQRIMVANIEEVLQRGEALSALDSKANNLSSLSKKYRQDAKYLNMHSTYAKLAAVAVFFIMLIVYVRFWWL

SEQ ID NO: 29603 - protein, 33 aa, Homo sapiens
VSSPSPPQRAQRGDHSSRGARPRPWGRFLGQTD

SEQ ID NO: 29604 - protein, 299 aa, Homo sapiens
LLDKKEPEVLRDSLDRCYSTPSGYLELSDSCQLYISAFYSLEEQHLGLALDVDRIKKDQEEEEDQGPSCPRLSRELLEGEEPEVLQDSLDRYLTPSSYLELPDSCQPYRSAFYSLEQQHVSLALDVEIEKYQEVEEDQNPSCPRRSRELLEVVESEVLQDSLDRCYLTPSSYLELPDSCQPYGSSFSSLEEQHVGFSLDVDEIEKYQEGEEDQNPPCPRLNGVLMEVEEPEVLQDSLDRCYSTPPTYFELPDSFQHYRSAFYSFKEQHSSLALEVDNRFFTLMVISLHLVFQMGVIFPH

SEQ ID NO: 29605 - protein, 43 aa, Homo sapiens [sequence omitted]

SEQ ID NO: 29606 - protein, 14 aa, Homo sapiens
MAQEGHSTGLDKRP

SEQ ID NO: 29607 - protein, 71 aa, Homo sapiens
LEENLRSSSWDRGMRALNHEWHRSQKLVSLYKDSATTQLSDHRESSLMMGDAPSVFSCDLLHRSVPPRIWR

SEQ ID NO: 29608 - protein, 13 aa, Homo sapiens
MMVVLYHLINKKK

SEQ ID NO: 29609 - protein, 100 aa, Homo sapiens
MWGVSAAPHPQRPTPCLSFMSVPFLYHPHPVVCIIGFVFSPFFSPFHSFSPLAFKIMKLCYGPCTSFASSCSPWWCTDEAGRWDPQTYISPTALSLLLYY

SEQ ID NO: 29610 - protein, 60 aa, Homo sapiens
LGGTSSLDPVDDKTQTGSAKDASHCHASLSQGCAAFGFTEEPCGRFYARGKSACSSCSAG

SEQ ID NO: 29611 - protein, 73 aa, Homo sapiens
VETSKQQKEARMKTVNSPLSTRPKEGGPACCGVATPGLGWAGPVEGTQELQVLRFPSMKLTGIRADFCLSVSR

SEQ ID NO: 29612 - protein, 153 aa, Homo sapiens
LGRECLVPAAPSPGPEGRAGRAASYPLLLLPISSPPRCEPEPPPPLPPLTHAAPGLAQRRVWDRVRGWKSLVESGRAGAIWRPCSEWASAPRGHWSELSSRSSSTPAGERRPLAKAVGTELLAWPQGKGLRTCGKVIPFPDPCQPGFLSGRGE

SEQ ID NO: 29613 - protein, 139 aa, Homo sapiens
LTYPQLPLPHVTLTYTLWGPPVLRLCLLAFVLTLEPPVPCGRLDRLEPIIVDITKHTFYKQPMFYHLGHFSKFIPEGSQRVGLVASQKNDPDAVALMHPDGSLNRSSKDVPLTIKDPAVGFLETISPGYSIHTYLWRRQ

SEQ ID NO: 29614 - protein, 341 aa, Homo sapiens
LLTATDSGSERPALHPGIGYNIIWVPMASCDFSIRTYTYADTPDDFQLHNFSLPEEDTKLKIPLIHRALQLAQRPVSLLASPWTSPTRLKTRGAGNGKGPLKGQPRDIYHQTWARYIVKFLDAYAEHKLQFWAVTAENEPSAGLLSGYPFQCLGFTPEHQRDFIARDLGPTLANGTHHNVRLLMLDDQRLLLPHWAKVVLTDPEAAKGLCGFQVLGAECAARLLGSRDAVQPQHHHKPPVPCGRLDRLEPIIVDITKHTFYKQPMFYHLGHFSKFIPEGSQRVGLVASQKNDPDAVALMHPDGSLNRSSKDVPLTIKDPAVGFLETISPGYSIHTYLWRRQ

SEQ ID NO: 29615 - protein, 354 aa, Homo sapiens
MCLQPLQEQKQWALDGAEYRTIQANCTGTGIGYNIIWVPMASCDFSIRTYTYADTPDDFQLHNFSLPEEDTKLKIPLIHRALQLAQRPVSLLASPWTSPTRLKTRGAGNGKGPLKGQPRDIYHQTWARYIVKFLDAYAEHKLQFWAVTAENEPSAGLLSGYPFQCLGFTPEHQRDFIARDLGPTLANGTHHNVRLLMLDDQRLLLPHWAKVVLTDPEAAKGLCGFQVLGAECAARLLGSRDAVQPQHHHKPPVPCGRLDRLEPIIVDITKHTFYKQPMFYHLGHFSKFIPEGSQRVGLVASQKNDPDAVALMHPDGSLNRSSKDVPLTIKDPAVGFLETISPGYSIHTYLWRRQ

SEQ ID NO: 29616 - protein, 289 aa, Homo sapiens
LLTATDSGSERPALHPGIGYNIIWVPMASCDFSIRTYTYADTPDDFQLHNFSLPEEDTKLKIPLIHRALQLAQRPVSLLASPWTSPTRLKTRGAGNGKGPLKGQPRDIYHQTWARYIVKFLDAYAEHKLQFWAVTAENEPSAGLLSGYPFQCLGFTPEHQRDFIARDLGPTLANGTHHNVRLLMLDDQRLLLPHWAKVVLTDPEAAKYVHGIAVHWYLDFLAPAKATLRETHHLFPNTMLFASEACVGSKFWEQSVRLGSWDRGMQYSHSIITNLLYHVVGWTDWNPSL

SEQ ID NO: 29617 - protein, 308 aa, Homo sapiens
VKGFGGAVTDAGALNILALSPPAQNLLLKWYFSEEGIGYNIIWVPMASCDFSIRTYTYADTPDDFQLHNFSLPEEDTKLKIPLIHRALQLAQRPVSLLASPWTSPTRLKTRGAGNGKGPLKGQPRDIYHQTWARYIVKFLDAYAEHKLQFWAVTAENEPSAGLLSGYPFQCLGFTPEHQRDFIARDLGPTLANGTHHNVRLLMLDDQRLLLPHWAKVVLTDPEAAKYVHGIAVHWYLDFLAPAKATLRETHHLFPNTMLFASEACVGSKFWEQSVRLGSWDRGMQYSHSIITNLLYHVVGWTDWNPSL

SEQ ID NO: 29618 - protein, 119 aa, Homo sapiens
LLTATDSGSERPALHPGIGYNIIWVPMASCDFSIRTYTYADTPDDFQLHNFSLPEEDTKLKIPLIHRALQLAQRPVSLLASPWTSPTRLKTRGAGNGKGPLKGQPRDIYHQTWARYIVK

SEQ ID NO: 29619 - protein, 32 aa, Homo sapiens
MLPWGAQLDISMEIPQEFQKTVSTMYYLWMCE

SEQ ID NO: 29620 - protein, 356 aa, Homo sapiens
VSVQEMRAENGPSEPSQKGKAQSSTLLLHIPPYCSNPRSSGTMEDKRNIQIIEWEHLDKKKFYVFGVAMTMMIRVSVYPFTLIRTRLQVQKGKSLYHGTFDAFIKILRADGITGLYRGFLVNTFTLISGQCYVTTYELTRKFVADYSQSNTVKSLVAGGSASLVAQSITVPIDVVSQHLMMQRKGEKMGRFQVRGNPEGQGVVAFGQTKDIIRQILQADGLRGFYRGYVASLLTYIPNSAVWWPFYHFYAEQLSYLCPKECPHIVFQAVSGPLAAATASILTNPMDVIRTRVQVEGKNSIILTFRQLMAEEGPWGLMKGLSARIISATPSTIVIVVGYESLKKLSLRPELVDSRHW

SEQ ID NO: 29621 - protein, 95 aa, Homo sapiens [sequence omitted]

SEQ ID NO: 29622 - protein, 34 aa, Homo sapiens
LLGWMRRSRRRRGGDRTEDGPCREEQAGENESRL

SEQ ID NO: 29623 - protein, 172 aa, Homo sapiens
LGQDNITVLHVKLTESAIQALQTYQSHKNLISFRPSIQFQRLQELVKIPKNDPLNEVHNFNFYLSNVGKDNPQGSFDCVQQTFSSSGASQLNCLGFIQDKITVCATNDSDQMTRERTTQAEEESRNRSTEVIKPGGPYVGKRVQIRKAPQAVSDTVPERKRSTPMNPANPIR

SEQ ID NO: 29624 - protein, 59 aa, Homo sapiens
LGLQHAKGHPLSLTEKNTLLSRGLNRLLTLPEVQCIFQDFQVFDAVMLRVHYPRLFIQE

SEQ ID NO: 29625 - protein, 7 aa, Homo sapiens
VERMEER

SEQ ID NO: 29626 - protein, 28 aa, Homo sapiens
MVLEEPLTKLSINLSFLKLPENGSIPCN

SEQ ID NO: 29627 - protein, 38 aa, Homo sapiens
MEPQVYAVQLPSPPESPCSSPTSVPLSLFTRNKGRISL

SEQ ID NO: 29628 - protein, 341 aa, Homo sapiens
VPALRNCAQTSSAAPWSRWRRPCGMPSWTRPRFMTSSWGEGSTRIPKVQKLLQDFFNGKELNKSINPDEAVAYGAAVQAAVLMGDKCEKVQDLLLLDVAPLSLGLETAGGVMTTLIQRNATIPTKQTQTFTTYSDNQPGVFIQVYEVERAMTKDNNLLGRFELIGIPPAPHGVPQIEVTFDIDANGILSVTATDRSTGKANKITNDKGRLSKEEVERMVHEAEQYGAEDEAQRDRVAAKNSLEAHVFHVKGSLQEESLRDKIPEEDRRKVQDKCQEVLAWLEHNQLAEKEEYEHQKRELEQICRPIFSRLYGGPGVPGGSSCSAQAHQGDPSTGPIIEEVD

SEQ ID NO: 29629 - protein, 351 aa, Homo sapiens
VDLNPGDGGKHPGKAEGTLWQILCVSSDAQPQTFGRVKGAHPPTLPPGSFLPIPVLWWGSIARLQIEKSDEVSRKGNWQVTEMGGGTGERLFTPSCLVGLVPLGLRISLVTCPLQCGIMWQLLLPTALLLLVSAGMRTEDLPKAVVFLEPQWYSVLEKDSVTLKCQGAYSPEDNSTQWFHNENLISSQASSYFIDAATVNDSGEYRCQTNLSTLSDPVQLEVHIGWLLLQAPRWVFKEEDPIHLRCHSWKNTALHKVTYLQNGKDRKYFHHNSDFHIPKATLKDSGSYFCRGLVGSKNVSSETVNITITQGLAVSTISSFSPPGYQVSFCLVMVLLFAVDTGLYFSVKTNI

SEQ ID NO: 29630 - protein, 67 aa, Homo sapiens
LSYKPLIVFCAEESLFCYTALYNGNKSHSGGKKLELFVFCFFGGGSLCEKSELLVTISPYYQQDNYL

SEQ ID NO: 29631 - protein, 44 aa, Homo sapiens
VQWYLQLIDHNQFVDFFVPSPFPLLHLPSLEEKKQKTKKNLVPL

SEQ ID NO: 29632 - protein, 11 aa, Homo sapiens
LTSAKVLNDWV

SEQ ID NO: 29633 - protein, 361 aa, Homo sapiens
MGVYGQESGGFSGLGENRSMSGPDNWGRGRGGFDRGGMSRGGRGGGCGGMGSAGEQVGFNKPGGPMDEGPDLDLGPPVDPDEDSDNSAIYVQGLNDNVTLDDLVDFFKQCGVVKMNKRTEQPMIHTYLDKETRKPKGDATVSCEDSPTAKAAVEWFDGKDFQGSKLKVSLARKRPPVNSMQGGMPPHEGRGMPPPLCGGPGGPGSPGGPMGHMGGRGGDRGGLPPRGPQGSRGNTSGGGNVQHQAGDRQCPNPGCGNQNFAWRTESNKCKAPKPEGFLPPPFPPPGGDHGRGGPGGMWGGRGGLMDHGGPGGMFRGGCGRDRSGFCGGWAWTEVALVEEDKVALGGPRTFDVTNGRKKRRT

SEQ ID NO: 29634 - protein, 147 aa, Homo sapiens
LQLDRGTHPPLFQPRLPEESEGRDCLMHTHEQAGLSPQDQRLMQNWHQLENLSNFIKAMVGYDMNPMDLFEANDLFESRNMTQVQLSLLALAGKVKTKLLQNGVDVGVKYSEKQERNFDDATLKASQCLTELQMGTNICACQSGATT

SEQ ID NO: 29635 - protein, 46 aa, Homo sapiens
LTKRGVWWSFCISKKKGQIGHHNSLYYSFFFPLMFMQILFYISEFG

SEQ ID NO: 29636 - protein, 67 aa, Homo sapiens
VMNARVTGGRKKDNWAQKKGLPRPGPCKGSAPGGRAALLVAKERSRAVPRVAARPGTPAPLRALAEQ

SEQ ID NO: 29637 - protein, 21 aa, Homo sapiens
VNHSIITFCCTECSNNNTIVF

SEQ ID NO: 29638 - protein, 36 aa, Homo sapiens
LHTRDQEALGDTAEKRLPKGRPAGIMESIPEETNQQ

SEQ ID NO: 29639 - protein, 68 aa, Homo sapiens
LKSVNVAKSLVLFFETGSCLTQARVQWPLKLTTASNFWAQVILSLPVVFVDCLMESHGTRRLKQCLQF

SEQ ID NO: 29640 - protein, 81 aa, Homo sapiens
LYFALINMLASLSGFLMTTTSKHAAYCLKGSCLTQARVQWPLKLTTASNFWAQVILSLPVVFVDCLMESHGTRRLKQCLQF

SEQ ID NO: 29641 - protein, 80 aa, Homo sapiens
LKKCRQTCYPKLGFLMTTTSKHAAYCLKGSCLTQARVQWPLKLTTASNFWAQVILSLPVVFVDCLMESHGTRRLKQCLQF

SEQ ID NO: 29642 - protein, 22 aa, Homo sapiens
LKEIFKVAKGFGGIYTLICRWE

SEQ ID NO: 29643 - protein, 10 aa, Homo sapiens
MTCLGLRIHD

SEQ ID NO: 29644 - protein, 56 aa, Homo sapiens
MVLGADAVWLWIAPYGQLCPQGRMRIATEVLKSKPNSSHWHTGMESRLDYTVWSKF

SEQ ID NO: 29645 - protein, 17 aa, Homo sapiens
LGNLLEIHLLLPIGKGD

SEQ ID NO: 29646 - protein, 57 aa, Homo sapiens
LYLISLGMVLGADAVWLWIAPYGQLCPQGRMRIATEVLKSKPNSSHWHTGIRQKAGS

SEQ ID NO: 29647 - protein, 53 aa, Homo sapiens
MNGMVLGADAVWLWIAPYGQLCPQGRMRIATEVLKSKPNSSHWHTGIRQKAGS

SEQ ID NO: 29648 - protein, 73 aa, Homo sapiens
MGTRRRAGEPALRSPGTILSFRGMVLGADAVWLWIAPYGQLCPQGRMRIATEVLKSKPNSSHWHTGIRQKAGS

SEQ ID NO: 29649 - protein, 53 aa, Homo sapiens
MVLGADAVWLWIAPYGQLCPQGRMRIATEVLKSKPNSSHWHTGETPLFCTSHF

SEQ ID NO: 29650 - protein, 31 aa, Homo sapiens
MVLGADAVWLWIAPYGQLCPQGRMRIATEVS

SEQ ID NO: 29651 - protein, 23 aa, Homo sapiens
LFLLLPFHKYFSRCSISLDILFF

SEQ ID NO: 29652 - protein, 269 aa, Homo sapiens
VFNFIGYSFFLIVFVPMIENSSWSMTFEERENRRLQEASMRLEQENDDLAHELVTSKIALRNDLDQAEDKADVLNKELLLTKQRLVETEEEKRKQEEETAQLKEVFRKQLEKAEYEIKKTTAIIAEYKQICSQLSTRLEKQQAASKEELEVVKGKMMACKHCSDIFSKEGALKLAATGREDQGIETDDEKDSLKKQLREMELELAQTKLQLVEAKCKIQELEHQRGALMNEIQAAKNSWFSKTLNSIKTATGTQPLQPAPVTQPPKEST

SEQ ID NO: 29653 - protein, 31 aa, Homo sapiens
VGRCCVAALKKNATLLFLSPTSGSAGVLRMH

SEQ ID NO: 29654 - protein, 57 aa, Homo sapiens
VTESCCMTQAGLQLLGSSHPPTSVSQGAGITGVSHPTRPRIHVCFLSLGFFFSMSTI

SEQ ID NO: 29655 - protein, 38 aa, Homo sapiens
LIPPSPPRVPPPQAHRFPPDVFSSSQSLPERFREPVLD

SEQ ID NO: 29656 - protein, 56 aa, Homo sapiens
LQTVNQRLHSPRGFHIKDIVMEWIELTDGYQHGQKKNGQNGSCIFKLISTMKKFRN

SEQ ID NO: 29657 - protein, 105 aa, Homo sapiens
LRPRSAAFAPRYTRLVMRRSSRSFRAPGVREPPFRPGLRSLPCSCFYHHPSPPNPVDPLVSPSLQCTGFPSSSAQSISAHLSNSMPSSLLTISRCPGMFAVRCPL

SEQ ID NO: 29658 - protein, 67 aa, Homo sapiens
LRPRSAAFAPRYTRLVMRRSSRSFRLQCTGFPSSSAQSISAHLSNSMPSSLLTISRCPGMFAVRCPL

SEQ ID NO: 29659 - protein, 42 aa, Homo sapiens
LRPRSAAFAPRYTRLVMRRSSRSFRHVAHAPQIFVEREGKWP

SEQ ID NO: 29660 - protein, 90 aa, Homo sapiens
LMKQEEHGSGIWKTWLLAATNQLCDSGKGGLSSYFCNMRTLDYLNSELRKLEGTLKPSKKEFGNVLHCCQFSSKNNLAWKLLVQWEFDSP

SEQ ID NO: 29661 - protein, 62 aa, Homo sapiens
MSKAHPPELKKFMDKKLSLKLNGGRHVQGILRGFDPFMNLVIDECVEMATSGQQNNIGMVVI

SEQ ID NO: 29662 - protein, 47 aa, Homo sapiens
LTLFFNGFFICEHSDKWIFKYWLGMGIVLFFKLQFTRCFESVRQKQK

SEQ ID NO: 29663 - protein, 24 aa, Homo sapiens
LEPMCISASPGLAFHMLLAHISAS

SEQ ID NO: 29664 - protein, 167 aa, Homo sapiens
LSVSKPVCVSAGVGGNLVAVQASRISTFLHMNGMPGENSEQAPRRCPSPCTTFFSPDVNSRSARVLFLLVVPGHLVFLYTISCMQGGHTTLTLIFIIFYMTAALLQVLILLYIADWMVHWMWGRGLDPDNFSIPYLTALGDLLGTGLLALSFHVLWLIGDRDTDVGD

SEQ ID NO: 29665 - protein, 85 aa, Homo sapiens
LRLASPPWAVEPSAGVRIACCRFIFSVFPTATCWGKTAKALEEQENKASCPRPPGFRRTQMMLLSPPKYNVLCSQYDPIQCRSIA

SEQ ID NO: 29666 - protein, 127 aa, Homo sapiens
LRTLWLCLFPVSARLLCKKKDGTKKGRVNGAQTYGLKACALPICCLAPSETRAKICPGLECFPEWLELEPGTRSSLIEVQFMCLWVWMAQSVSGLRKADLAPTLTLTDPGIYSRNWKPSATGAWRSS

SEQ ID NO: 29667 - protein, 149 aa, Homo sapiens
LKACALPICCLAPSETRAKICPGLECFPEWLELEPGTRSSLIEVQFMCLWVWMAQSVSGLRKADLAPTLTLTGGEDAEDPTERAAPESSTAAVLQEEEPGARGEGQSAASPGQGARALQAARTGDCPQGTLVLCQKDFFSQRAGDRHQL

SEQ ID NO: 29668 - protein, 249 aa, Homo sapiens
LIDDRDMPVKVEAAIVLQVFISNQEKSKECITAFIRPVMQALLHIITETENDDLTNVIQKMICENSEEVTPIAVEMTQQLAMTFSQVIQTGPDEEGSDDKAVTAMGILNTIDTLLSVVEDHKEITQQLEGICLQVIGTVLQQHVSEFYEDISLAHSLTCQQVSPQMWQLLPLVFEVFQQDGFDYFTDMMPLLYNYVTVDTKTLLSDTKYLEMIYSMCTKDSSSSCRRRCSVSYGKIVRGHRSAVQRASR

SEQ ID NO: 29669 - protein, 143 aa, Homo sapiens
VTFPTRSGVGFRGARRTGCSAPSVRLRLSSRTKQVVSLQFPTWQGGLIDMDKKSTHRNPEDARAGKYEGKHKRKKRRKQNQNQHRSRHRSVTSFSSDDPMFPSSSSSSSGSQTDSSIEDAAKGKIKKKRREKTNKWEKRKDKI

SEQ ID NO: 29670 - protein, 148 aa, Homo sapiens
LRLSSRTKQVVSLQFPTWQGGLIDMDKKSTHRNPEDARAGKYEGKHKRKKRRKQNQNQHRSRHRSVTSFSSDDPMFPSSSSSSSGSQTDSSIEDAAKGKIKKKRREKTNKWEKRKSLVLLLRLECNDATSAHCNLCLPDSSNSPATAS

SEQ ID NO: 29671 - protein, 24 aa, Homo sapiens
LSSRTKQVVSLQFPVSDRSSRGCG

SEQ ID NO: 29672 - protein, 41 aa, Homo sapiens
LMRWLGDLNLNIFHTKFRLMKPIFRCSVNHIIKSLEIIFCF

SEQ ID NO: 29673 - protein, 58 aa, Homo sapiens
MPPPSFGGETSKILRTEESILFILGHSLVKLVRNYDSSVGSKCKCGRSKLMCEADISV

SEQ ID NO: 29674 - protein, 71 aa, Homo sapiens
MDLTCDKMCSMVKKWQTMIEAPVNVKTTNGYVLRLFCVGFAKKHNNPIWKTSYAQHQQVRQIRKKILEIMT

SEQ ID NO: 29675 - protein, 121 aa, Homo sapiens
VTADPSFLQPGLAVGLGFGALAEVAKKSLRSEDPSGKKAVLGSSPFLSEANAERIVRTLCKVRGAALKLGQMLSIQGEWARGLLPRDCVGCWGGQLPGPGAVAPPKLSGQDVSRLGRDLRR

SEQ ID NO: 29676 - protein, 78 aa, Homo sapiens
MRPPGPEICVIVGKRRKTNKGTVNGVTWLEYGSNYKACSALARRCSLALSPRLECNGTILAHCNLCLPGSSDSSASAS

SEQ ID NO: 29677 - protein, 197 aa, Homo sapiens
LARSCSLGVFGVRMALEGMSKRKRKRSVQEGENPDDGVRGSPPEDYRLGQVASSLFRGEHHSRGGTGRLASLFSSLEPQIQPVYVPVPKQTIKKTKRNEEEESTSQIERPLSQEPAKKVKAKKKHTNAEKKLADRLVKFSYLMLKKLDGKLTFLYLEYSSVLFHISTFFQNFYYGKSSTYRKVEKAKKPRVLSISNY

SEQ ID NO: 29678 - protein, 36 aa, Homo sapiens
LVRTVEALQTAIKLQPVTQPEPLRMAPSAGNPYMGL

SEQ ID NO: 29679 - protein, 42 aa, Homo sapiens
LEFKLWVRSSLAGTLTLWRIAVSPIFPFHPKKSCFSHPSNSL

SEQ ID NO: 29680 - protein, 39 aa, Homo sapiens
VDTVEEAHITCGCRDFTGNHEQVNTVLPRTEGICTVKVT

SEQ ID NO: 29681 - protein, 20 aa, Homo sapiens
LYTVIDYMGWGGVKELDRLC

SEQ ID NO: 29682 - protein, 293 aa, Homo sapiens
MGFSNSWDIQIVHAALFFLVYLAAVIGNLLIIILTTLDVHLQTPMYFFLRNLSFLDFCYISVTIPKSIVSSLTHDTSISFFGCALQAFFFMDLATTEVAILTVMSYDRYMAICRPLHYEVIINQGVCLRMMAMSWLSGVICGFMHVIATFSLPFCGRNRIRQFFCNIPQLLSLLDPKVITIEIGVMVFGTSLVIISFVVITLSYMYIFSVIMRIPSKEGRSKTFSTCIPHLVVVTLFMISGSIAYVKPISNSPPVLDVFLSAFYTVVPPTLNPVIYSLRNRDMKAALRRQCGP

SEQ ID NO: 29683 - protein, 168 aa, Homo sapiens
VCRAEPFLSRGSSRSHRGRRSRERGPPGPASTPTTAKDAAAGLAAARPPAAPASEPGARVRKMIKRLHLVAAAGPEGARPPAAPASEPRAQVRKMINRRHLVAGSVIGPKSNKDKWEPGPRRLWQGGECLDPARRTSRVAGGSSAMWASTGRRHRQNSTLSKKINEKD

SEQ ID NO: 29684 - protein, 119 aa, Homo sapiens
MENYNQTSTAFILLGLSPPPKIGHFIFILINFVFLMALIGNLSMILLIFLDIHLHTPMYFLLSQLSLIDLNYISTIVPKMVYDFSVWKQVYLLHWVWDSEFLLPDFSRCRSAAPDINGL

SEQ ID NO: 29685 - protein, 62 aa, Homo sapiens
LTQPEQLPVLKAAFMTQSPQLQSKDGFSWNLERANPVRQPVILEVKEQKKKKKGKISHKISI

SEQ ID NO: 29686 - protein, 82 aa, Homo sapiens
MTSGTSPPNSTIWEWQTDSAPGEHHIKDKCVCLKMASFGLAWWLTSIIPALWEAESKCTVLVKSAVAYSNVQGFHIHSPLAH

SEQ ID NO: 29687 - protein, 32 aa, Homo sapiens
LNECYLMVPMMLEDTCASHAVVTASIVMNIGY

SEQ ID NO: 29688 - protein, 54 aa, Homo sapiens
LKSQLGGNQFALFDEEFGHQTTDTFPKVWQKLFFEWLTRVPRRISMELEDSGLP

SEQ ID NO: 29689 - protein, 58 aa, Homo sapiens
LIWRKKSQLGGNQFALFDEEFGHQTTDTFPKVWQKLFFEWLTRVPRRISMELEDSGLP

SEQ ID NO: 29690 - protein, 57 aa, Homo sapiens
LSLQKSQLGGNQFALFDEEFGHQTTDTFPKVWQKLFFEWLTRVPRRISMELEDSGLP

SEQ ID NO: 29691 - protein, 43 aa, Homo sapiens
LEETSLHYLMRNLATKPLILSQRFGRNCFLSGSPEYPEESVWN

SEQ ID NO: 29692 - protein, 15 aa, Homo sapiens
MSSTCRCGSSPDAIE

SEQ ID NO: 29693 - protein, 39 aa, Homo sapiens
LGSSSVSLPAPTAEPPLSSLQDPEIQATQRKEEGAVGIY

SEQ ID NO: 29694 - protein, 16 aa, Homo sapiens
MGTRALCKGWDRNPRE

SEQ ID NO: 29695 - protein, 8 aa, Homo sapiens
LQPGSGCC

SEQ ID NO: 29696 - protein, 18 aa, Homo sapiens
MNARTESQVLHVLTCKWE

SEQ ID NO: 29697 - protein, 71 aa, Homo sapiens
LLIEMEFLTRNIALELQREKAPLQVRWQTTSGWKCISSSPSLLPCDLLQIRERQREEQKNRRMEWQREEKE

SEQ ID NO: 29698 - protein, 38 aa, Homo sapiens
LNYNEKKNTSYSCSTSSSEMADHLRMEMYFFIPLSTSL

SEQ ID NO: 29699 - protein, 31 aa, Homo sapiens
LVIQHSSTSSSEMADHLRMEMYFFIPLSTSL

SEQ ID NO: 29700 - protein, 35 aa, Homo sapiens
LSFQGKPNTVAKLPVKETMSTPAHRDGIPNPEYCP

SEQ ID NO: 29701 - protein, 37 aa, Homo sapiens
MREVWENVECQSRGNTRRQGICISFRPWQRAPWEMRI

SEQ ID NO: 29702 - protein, 550 aa, Homo sapiens
LSLPVSRRPRPLGRAQSRPPPLPPRAPANMTSAFKLDFLPDMMVEGRLLVPDRINGTANKMNGALDHSDQPDPDAIKMFVGQIPRSWSEKELKELFEPYGAVYQINVLRDRSQNPPQSKGCCFVTFYTRKAALEAQNALHNIKTLPGMHHPIQMKPADSEKSNAVEDRKLFIGMVSKKCNENDIRVMFSPFGQIEECRILRGPDGLSRGCAFVTFSTRAMAQNAIKAMHQSQTMEGCSSPIVVKFADTQKDKEQRRLQQQLAQQMQQLNTATWGNLTGLGGLTPQYLALLQQATSSSNLGAFSGIQQMAGMNALQLQNLATLAAAAAAAQTSATSTNANPLSTTSSALGALTSPVAASTPNSTAGAAMNSLTSLGTLQGLAGATVGLNNINALAVAQMLSGMAALNGGLGATGLTNGTAGTMDALTQAYSGIQQYAAAALPTLYSQSLLQQQSAAGSQKEGPEGANLFIYHLPQEFGDQDILQMFMPFGNVISAKVFIDKQTNLSKCFGFVSYDNPVSAQAAIQAMNGFQIGMKRLKVQLKRSKNDSKPY

SEQ ID NO: 29703 - protein, 562 aa, Homo sapiens
LSLPVSRRPRPLGRAQSRPPPLPPRAPANMTSAFKLDFLPDMMVEGRLLVPDRINGTANKMNGALDHSDQPDPDAIKMFVGQIPRSWSEKELKELFEPYGAVYQINVLRDRSQNPPQSKGCCFVTFYTRKAALEAQNALHNIKTLPGMHHPIQMKPADSEKSNAVEDRKLFIGMVSKKCNENDIRVMFSPFGQIEECRILRGPDGLSRGCAFVTFSTRAMAQNAIKAMHQSQTMEGCSSPIVVKFADTQKDKEQRRLQQQLAQQMQQLNTATWGNLTGLGGLTPQYLALLQQATSSSNLGAFSGIQQMAGMNALQLQNLATLAAAAAAAQTSATSTNANPLSTTSSALGALTSPVAASTPNSTAGAAMNSLTSLGTLQGLAGATVGLNNINALAGTINTPRSKRLLLPKDNNGMAALNGGLGATGLTNGTAGTMDALTQAYSGIQQYAAAALPTLYSQSLLQQQSAAGSQKEGPEGANLFIYHLPQEFGDQDILQMFMPFGNVISAKVFIDKQTNLSKCFGFVSYDNPVSAQAAIQAMNGFQIGMKRLKVQLKRSKNDSKPY

SEQ ID NO: 29704 - protein, 21 aa, Homo sapiens
MCKRIYEAFGLPRNVKYKDQE

SEQ ID NO: 29705 - protein, 9 aa, Homo sapiens
MKHLDYQEM

SEQ ID NO: 29706 - protein, 19 aa, Homo sapiens
LYPIAMANLFVSGDPSFYI

SEQ ID NO: 29707 - protein, 19 aa, Homo sapiens
LLAESLLSQRGAIQITRLP

SEQ ID NO: 29708 - protein, 9 aa, Homo sapiens
MGKLVSVRL

SEQ ID NO: 29709 - protein, 33 aa, Homo sapiens
LGVRGAQQFVFLQDLPGDSENHCASELFLSVAT

SEQ ID NO: 29710 - protein, 41 aa, Homo sapiens
LSTMCAIHKPWHLNNFLEGSIRTTRRGCTSEVIFQMCYSDL

SEQ ID NO: 29711 - protein, 38 aa, Homo sapiens
LVDMAAEGGDGLGGGGGADWLPEKRRTRARQQSSLWMT

SEQ ID NO: 29712 - protein, 63 aa, Homo sapiens
LAKRSFSSCSSTFSLVRVFLNSVLMASASEKSTESCRSRTPGTLLRRRTAEERVAYTPPGDEA

SEQ ID NO: 29713 - protein, 33 aa, Homo sapiens
MMSSARLSRSTSTRALSLVSWSTCRRSSRISSS

SEQ ID NO: 29714 - protein, 49 aa, Homo sapiens
VGPDLGKPSPRAGRAATREARLGKCRAGSDPPQGLQTASESREGLELSL

SEQ ID NO: 29715 - protein, 245 aa, Homo sapiens [sequence omitted]

SEQ ID NO: 29716 - protein, 33 aa, Homo sapiens
MHKNLCIEIYLKIQDASHLCNIYLEDSYLGVLT

SEQ ID NO: 29717 - protein, 371 aa, Homo sapiens
LRNKIGIVEEKRGGRLEKQTQQEAGGQQGTSQQPAGQSLVRKRVTESRESQMMIEERKQLITVREEAWKTRGRGAANDSTQFTVAGRMVKKGLASPTAITPVASAICGKTRGTTPVSKPLEDIEARPDTQLEWDLKLDRLETFLRRLNNKIGGMHETVLTVTGKSVKELMKPDDDETFAQFYRNVDCNMLRSPVELDEDFDVIFDPYAPKLTSSVAEHKWAVRPKRQVQASKNPLKMLAAREDLLQEYTEQRLNVAFMESKRIKVEKISSNSSFSEVTLAGLASKENFSNVSLRSVNLTEQNSNNSAVPFKRLMLLQIKGRRHVQTRLVEPRASALNSGDCFLLLSPHCCFLWVGEFANAIEKAKASELAA

SEQ ID NO: 29718 - protein, 383 aa, Homo sapiens
LGGQTSYQSAGDPKEDELYEAAIIETNCIYCLMDDKLVPDDDYWGKIPKCSLLQPKEVLVFDFGSEVYVWHGKEVTLAQRKIEFQLAKHLWNGTFDYENCDINPLDPGECNPLIRRKGQGRPDWAIFGRLTEHNETILFKEKFLDWTELKRPNEKNPGELAQHKEDSRADVKRNNVTRMVSVPQTTAGAILDRVNIGCGCGLVEGHHRRQFEITSVSVDVWYILEFDYSRLPKQSIGQFHEGDAYVVKWKFMVSTADPGSFNFAPRLFVLSSSSGDFAATEFVYPARAPSVVSSMPFLQEDLYSVPQPVPFLDNHHEVCLWQGWWPIENKITGSARICRASDQKSTMETMLQYCKGKKSQEASPQVLPYPCWSGAPNIHQYVS

SEQ ID NO: 29719 - protein, 10 aa, Homo sapiens
MPTITTSHNT

SEQ ID NO: 29720 - protein, 24 aa, Homo sapiens
LIEKLRKLKRDRSIGNNVVHHLAQ

SEQ ID NO: 29721 - protein, 81 aa, Homo sapiens
MSNTHTVLVSLPHPHPALTCCHLGLPHPVRAPRPLPRVEPWDPRWQDSELRYPQAMNSFLNERSSPCRTLRQEASADRCDL

SEQ ID NO: 29722 - protein, 10 aa, Homo sapiens
VQDLKARSIG

SEQ ID NO: 29723 - protein, 29 aa, Homo sapiens
LSELERDAWFPPKRTGMGSDFNEIELQLD

SEQ ID NO: 29724 - protein, 33 aa, Homo sapiens
LWCFPVSKPRDAWFPPKRTGMGSDFNEIELQLD

SEQ ID NO: 29725 - protein, 111 aa, Homo sapiens
VVGRGRRMPGNRRDAVRKATGCRSWKGKVGGSAASCLRAGHTRRGCPGQGGIWLILPVPCALGAAPPSAQRSPPACFLEAGLPSVPRLACPPPAPRGQGKGSRSGLPGEFP

SEQ ID NO: 29726 - protein, 40 aa, Homo sapiens
LLLGTGRFAATVGTAEFELRGEGKVFLRCGGEREADAGKP

SEQ ID NO: 29727 - protein, 50 aa, Homo sapiens
VGKSAERSNSRSTRDQKSGQCVPAARPAPGMRRRRRRLTVQGGGRGGGSR

SEQ ID NO: 29728 - protein, 57 aa, Homo sapiens
LDFSLLKSEAKRSSILQKSTGDDSGLKMIMKPLCKYQSGDEAVMNFDQKPCFVGLPL

SEQ ID NO: 29729 - protein, 440 aa, Homo sapiens
VKYEETVFYGLQYILNKYLKGKVVTKEKIQEAKDVYKEHFQDDVVNEKGWNYILEKYDGHLPIEIKAVPEGFVIPRGNVLFTVENTDPECYWLTNWIETILVQSWYPITVATNSREQKKILAKYLLETSGNLDGLEYKLHDFGYRGVSSQETAGIGASAHLVNFKGTDTVAGLALNKKYYGTKDPVPGYSVPAAEHSTITAWGKDHEKDAFEHIVTQFSSVPVSVVSNSYDIYNACEKIWGEDLRHLIVSRSTQAPLIIRPDSGNPLDTVLKVLEILGKKFPVTENSKGYKLLPPYLRVIQGDGVDINTLQEIVEGMKQKMWSIENIAFGSGGGLLQKLTRDLLNCSFKCSYVVTNGLGINVFKDPVADPNKRSKKGRLSLHRTPAGNFVTLEEGKGDLEEYGQDLLHTVFKNGKVTKSYSFDEIRKNAQLNIELEAAHH

SEQ ID NO: 29730 - protein, 193 aa, Homo sapiens
LVDFTVAATVVYLVTEVDYKFMKPTQEINISLVWCLLVSSFAIEVLFSLITHYFKVEDAGERSVCVTFGFFFFVKAMAVLIVTENYLEFGLETGFTNFSGSAMQFLEKQGLESQSPVLKLTSKFFPGYFLFTHWGFFHISWITAGSNASGYPEFGNRKNYTNIISYQLLGTFIYGSALGKTSHQRLHYEPNLG

SEQ ID NO: 29731 - protein, 143 aa, Homo sapiens
LPSSPPDALQDKAMTEGDMGVTLEASTEADLKVGNSCLEPVPSRRSKLRKPKPVPLRKKAIEGEFSDAGTAVEGTPLPKASYHFSPEEVDENTSPSLLGSAGFQKSPPDLKETPSTTKALPRKLGKKPGSKLTHKIQKDGISK

SEQ ID NO: 29732 - protein, 271 aa, Homo sapiens [sequence omitted]

SEQ ID NO: 29733 - protein, 220 aa, Homo sapiens
LLCSHFTQDLWLDQNIKNSFQKVILRRYEKSRHENLQIRKGCKSLNASKLQEGGYNGLNQCLSVTQSKILQCNTCVKVFRKFSNSNRLRRRHTGEKPFKCKECGQFFHRFSHLRQHEIIHTEEKPYQHEECGKDFKQSSGLTIHERIHTKERPYKCEECDKAFKQSSKLNKHKKIYTGDTTYKCEECGKAFSYSSTVTQHNIVHTEDKPYKCEDCGKALK

SEQ ID NO: 29734 - protein, 181 aa, Homo sapiens [sequence omitted]

SEQ ID NO: 29735 - protein, 44 aa, Homo sapiens
LAEFEEKMNENWKKELEKHREKLLTASESSSKKKTEKEKRKEEI

SEQ ID NO: 29736 - protein, 118 aa, Homo sapiens
MASTPEPGEPEERKSLKLLGFLDVENTPCARHSILYGSLGSVVAGFGHFLFTSRIRRSCDVGVGGFILVTLGCWFHCRYNYARQRIQERIAREEIKKKILYEGTHLDPERKHNGGSSN

SEQ ID NO: 29737 - protein, 404 aa, Homo sapiens
LRPRLQAASPRSAWRPAGRGRRLGEGRVRGWGRGRERSRVRGGPRSRDGAPERREPGLGVLLREEEWSRGDAAAALTMSFLGGFFGPICEIDIVLNDGETRKMAEMKTEDGKVEKHYLFYDGESVSGKVNLAFKQPGKRLEHQGIRIEFVGQIELFNDKSNTHEFVNLVKELALPGELTQSRSYDFEFMQVEKPYESYIGANVRLRYFLKVTIVRRLTDLVKEYDLIVHQLATYPDVNNSIKMEVGIEDCLHIEFEYNKSKYHLKDVIVGKIYFLLVRIKIQHMELQLIKKEITGIGPSTTTETETIAKYEIMDGAPVKGESIPIRLFLAGYDPTPTMRDVNKKFSVRYFLNLVLVDEEDRRYFKQQEIILWRKAPEKLRKQRTNFHQRFESPESQASAEQPEM

SEQ ID NO: 29738 - protein, 98 aa, Homo sapiens
LLPNYLNGFECFVCDYELARLDAEKAHAASPGDSPVFEPHIAQPSHMDCPVPTPGFGNVEEIPENDRKEQEGRQTFRLGAVAHACDPSTLGGQGRRIA

SEQ ID NO: 29739 - protein, 761 aa, Homo sapiens
LGWLGPLGRLFSPSPFLGTVPRSLTPSTTVSSILRNPIYTVRSHRVGPCSSPPAARDAGPQGLHPSVQHQGRLSLDLSHRTCSDYSEMRATHGSNSLPSSARLGSSSNLQFKAERIKIPSTPRYPRSVVGSERGSVSHSECSTPPQSPLNIDTLSSCSQSQTSASTLPRIAVNPASLGERRKDRPYVEEPRHVKVQKGSEPLGISIVSGEKGGIYVSKVTVGSIAHQAGLEYGDQLLEFNGINLRSATEQQARLIIGQQCDTITILAQYNPHVHQLSSHSRSSSHLDPAGTHSTLQGSGTTTPEHPSVIDPLMEQDEGPSTPPAKQSSSRIAGDANKKTLEPRVVFIKKSQLELGVHLCGGNLHGVFVAEVEDDSPAKGPDGLVPGDLILEYGSLDVRNKTVEEVYVEMLKPRDGVRLKVQYRPEEFTKAKGLPGDSFYIRALYDRLADVEQELSFKKDDILYVDDTLPQGTFGSWMAWQLDENAQKIQRGQIPSKYVMDQEFSRRLSMSEVKDDNSATKTLSAAARRSFFRRKHKHKRSGSKDGKDLLALDAFSSDSIPLFEDSVSLAYQRVQKVDCTALRPVLILGPLLDVVKEMLVNEAPGKFCRCPLEVMKASQQAIERGVKDCLFVDYKRRSGHFDVTTVASIKEITEKNRHCLLDIAPHAIERLHHMHIYPIVIFIHYKSAKHIKEQRDPIYLRDKVTQRHSKEQFEAAQKLEQEYSRYFTGVIQGGALSSICTQILAMVNQEQNKVLWIPACPL

SEQ ID NO: 29740 - protein, 184 aa, Homo sapiens
LGWLGPLGRLFSPSPFLGTVPRSLTPSTTVSSILRNPIYTVRSHRVGPCSSPPAARDAGPQGLHPSVQHQGRLSLDLSHRTCSDYSEMRATHGSNSLPSSARLGSSSNLQFKAERIKIPSTPRYPRSVVGSERGSVSHSECSTPPQSPLNIDTLSSCSQSQTSASTLPRIAVNPASLGERRKDS

SEQ ID NO: 29741 - protein, 14 aa, Homo sapiens
MAGVTAQAPPENAV

SEQ ID NO: 29742 - protein, 20 aa, Homo sapiens
VYRRNAHGNPVHYHRAGISG

SEQ ID NO: 29743 - protein, 8 aa, Homo sapiens
VGEYGAEK

SEQ ID NO: 29744 - protein, 68 aa, Homo sapiens
MGIFEERCEHICMGPCIHECAHMCNYSYNSWWILLRGCSQTPGRERLEGKLSKAGPFIVPGQPEESLR

SEQ ID NO: 29745 - protein, 76 aa, Homo sapiens
VGPGSMKELAARVPNPVPIMEGDFSLSSFSIPFHIAHASKGRPEDSLAGQGHFLLAFFSPQSLADYQLRHTAGYVL

SEQ ID NO: 29746 - protein, 12 aa, Homo sapiens
LPRLILWPPPGN

SEQ ID NO: 29747 - protein, 80 aa, Homo sapiens
MFANWFPAMKKFKTLIIRVIIVIETCLLLLCLIPVFLQMIKNFVTTLVHQNALAEAYYINHYQSIAQKDISSKNKTQNSH

SEQ ID NO: 29748 - protein, 88 aa, Homo sapiens
MERLARAACSRPPRKINTVAEHQEGTGTWSPDIYNLAQPPRPPLNISRLGAVRGWEQLCQPLQSDSEEDDKPCSGHTRKLTGSRMAEA

SEQ ID NO: 29749 - protein, 17 aa, Homo sapiens
VSERFCLRLTLLHFLVP

SEQ ID NO: 29750 - protein, 26 aa, Homo sapiens
LKLFCMEVYLEKWFLSHCLVLDKLFV

SEQ ID NO: 29751 - protein, 323 aa, Homo sapiens
MSGDEMIFDPTVSKKKKKKKKPFMLDEEADTQTEITQPSETKEVGPEPTEDKDLEADEEDTRKKDAAGDLDDLNFFNQKKKKKKTKKIFDIDEAEEGVKDLKIESDVQEPTEPENDLDIMLGNKKKKKKVKFPDEDEILEKDEVLEEEDSKKDDGISFSNQTGPAWAGSERDYTYEELLNRVFNIMREKNPGMVAGDIRKFVMKPPQVVRVGTKKTSFVNFTHICKLLHHQPKHLRAFLLAELGTSGSIDGNNQLVIKGRFQQKQIENVLRRYIKEYVTCHTCRLLDTILQKDMRIYFLQCETCHSRCSVASIKTSYQAVMGK

SEQ ID NO: 29752 - protein, 862 aa, Homo sapiens
MASEVPYASGMPIKKIGHRSVDSSGGTTSSALKGAIQLGITHTVGSLSTKPESDVLMQDFHMVESIFFPSEGSNLTPAHHYNAFRFKTYAPVAFRYFWELFGIRPDDYLYSLCSEPLIELCSSGASGSLFYVSSDDEFIVKTVRHKEAEFLQKLLPGYYINLNQNPRTLLPKFYGLYCVQTGGKNIRIVVMNNLLPRSVKMHIKYDLKGSTYRRRASQKEREKPLPTFKDLDFLQDIPDGLFLDADVHNALCKTLQRDCLVLQSFKIMDYSLLMSIHNIDHAQREPLSSETQYSVDTRRPAPQKALYSTAMESIQGEARRGGTMETDDHMGGIPARNSKGERLLLYIGIIDILQSYRFVKKLEHSWKALIHDGDTVSVHRPGFYAEWFQRFMCNTVFKKIPLKPSPSKKLRSGSSFSQRAGSSGNSCITYQPLVSGEHKAQVTTKAEVEPGVHLGCPDVLPQTPPLEEISEGSPTPDPSFSPLVEETLQMLTTSVDNSEYMGNGDFLPTRLQAQQDAVNTVCHSKTRSNPENNVGLITLDNDCEVLTTLTPDTGRILSKLHTVQPKGKITFCMGIHVAHLALKHRQGNNHKIRIIAFVGNPVEDNEKNLVKLAKCLKKEKVNVDIINFGEEEVNTEKLTAFVNTLNGKDGTGSHLVTVPPGPSLADALISFPILAGEGGAMMGLGASDFEFGVDPSADPELALVLRVFMEEQRQRQEEEARQAAAASAAEAGIATTGTEDSDDALLKMTISQQEFGHTGLPDLSSMTEEEKIVCAMQMSLQGAEFGLAESADIDASSAMDTSEPAKEEDDYDVMQDPEFLQSVLENLPGVDPNNEAIRNAVGSLASQATKDSKKDKKEEDKK

SEQ ID NO: 29753 - protein, 57 aa, Homo sapiens
LCSVVFSKLAKVSAGPSEFSKQEKIWLLGETSSFWRHHLQNLLEVDDTDFHELFSFC

SEQ ID NO: 29754 - protein, 57 aa, Homo sapiens
LCSVVFSKLAKVSAGPSEFSKQEKIWLLGETSSFWRHHLQNLLEVDDTDFHELFSCE

SEQ ID NO: 29755 - protein, 58 aa, Homo sapiens
MAPRPGTRSCAGFAGGLVARGRGAAGEAGAGADAEAGARQALEPRACSRWSRNPAGSG

SEQ ID NO: 29756 - protein, 33 aa, Homo sapiens
MPYTLAGGKAWDEQERDAYADRAQLTARTKGDA

SEQ ID NO: 29757 - protein, 100 aa, Homo sapiens
LFFQPISTEGRWWPITRMTSPLSTGSEGSAAPPAPPRLTTSSSRSWPRSTPMHMDGCSKVGTAEITSQMASPMGLPGILSARECKTLIISIPTALRSRWN

SEQ ID NO: 29758 - protein, 114 aa, Homo sapiens
LSFLWRGGSALFSLYVALPCSWGSGLLSWRGCLSICNWAHLFASWPFLFLLCLQYHEPPEDIKALSWNRQAQHILSSAHPSGKAVVWDLRKNEPIIKVSDHSNRGDLVSVMEPG

SEQ ID NO: 29759 - protein, 152 aa, Homo sapiens
LHPNLGRLKSHRPHPKLRAALLAHPPPAGLAAMTAPARRSRSLRPGMWSPKEWWEPQPGRDAAAARARSPYPGHLWKPAHLLHQPFPNTVVPPLPSLLKNRIVWGSGIFWTPGTPIRLPLVPLLQSNEPMGCQALETFPPILTMSPFCQRRN

SEQ ID NO: 29760 - protein, 287 aa, Homo sapiens
LLDPDGAGGAGRRSPGHGAGVPRLAGRARAAGRGRADSGALRARRGSHSDEIPVPGQRHQPASAFLLPSQIETEGGGREVEKKATGEGGREKPRRRSGLTPGRLLLRSPEARRPRRGETPRARLRAGRAPGLCRGKQGLIKLERNFSQLLMNRRLGSRPSPPLPRPSPFAPPAPSSPLSFLLGLCWGLEGSGLRSEPACGGGARPSRHPQRPAILGSAAAAGVWARSLRAPRRPLAPDSFFFFFGGIFFFPRGGLAASNKLGEREGENAKSRFLSTSAPPTPVLSKK

SEQ ID NO: 29761 - protein, 102 aa, Homo sapiens
LVLCICTLCRWSKIVMESVLEENKGKIRLNCMYMAPLWLVTLLKSSVCQCIWIHEEKERVSEWNKEWEEVICNVTNCAITPRSNFSSALHGIVYQWRNVLFP

SEQ ID NO: 29762 - protein, 52 aa, Homo sapiens
LENRNIDYQIIMKLKLYCFFEQLFIPVIKTDCAEYSKRSEIGVYNYIFSDAI

SEQ ID NO: 29763 - protein, 53 aa, Homo sapiens
VQKKSGRERRRPPLPCTALLEATWRVRPRGGHGHKCPQLAPGGVERSCWEAAG

SEQ ID NO: 29764 - protein, 1295 aa, Homo sapiens
LDKRTGERELGGKSGEDRRGAPAGATSFPAAPSPLPLHTHARSLAGARTPPAPDPHLGGRHTLGSPSRGSRSGMEAARTERPAGRPGAPLVRTGLLLLSTWVLAGAEITWDATGGPGRPAAPASRPPALSPLSPRAVASQWPEELASARRAAVLGRRAGPELLPQQGGGRGGEMQVEAGGTSPAGERRGRGIPAPAKLGGARRSRRAQPPITQERGDAWATAPADGSRGSRPLAKGSREEVKAPRAGGSAAEDLRLPSTSFALTGDSAHNQAMVHWSGHNSSVILILTKLYDFNLGSVTESSLWRSTDYGTTYEKLNDKVGLKTVLSYLYVNPTNKRKIMLLSDPEMESSILISSDEGATYQKYRLTFYIQSLLFHPKQEDWVLAYSLDQKLYSSMDFGRRWQLMHERITPNRFYWSVAGLDKEADLVHMEVRTTDGYAHYLTCRIQECAETTRSGPFARSIDISSLVVQDEYIFIQVTTSGRASYYVSYRREAFAQIKLPKYSLPKDMHIISTDENQVFAAVQEWNQNDTYNLYISDTRGIYFTLAMENIKSSRGLMGNIIIELYEVAGIKGIFLANKKVDDQVKTYITYNKGRDWRLLQAPDVDLRGSPVHCLLPFCSLHLHLQLSENPYSSGRISSKETAPGLVVATGNIGPELSYTDIGVFISSDGGNTWRQIFDEEYNVWFLDWGGALVAMKHTPLPVRHLWVSFDEGHSWDKYGFTSVPLFVDGALVEAGMETHIMTVFGHFSLRSEWQLVKVDYKSIFSRHCTKEDYQTWHLLNQGEPCVMGERKIFKKRKPGAQCALGRDHSGSVVSEPCVCANWDFECDYGYERHGESQCVPAFWYNPASPSKDCSLGQSYLNSTGYRRIVSNNCTDGLREKYTAKAQMCPGKAPRGLHVVTTDGRLVAEQGHNATFIILMEEGDLQRTNIQLDFGDGIAVSYANFSPIEDGIKHVYKSAGIFQVTAYAENNLGSDTAVLFLHVVCPVEHVHLRVPFVAIRNKEVNISAVVWPSQLGTLTYFWWFGNSTKPLITLDSSISFTFLAEGTDTITVQVAAGNALIQDTKEIAVHEYFQSQLLSFSPNLDYHNPDIPEWRKDIGNVIKRALVKVTSVPEDQILIAVFPGLPTSAELFILPPKNLTERRKGNEGDLEQIVETLFNALNQNLVQFELKPGVQVIVYVTQLTLAPLVDSSAGHSSSAMLMLLSVVFVGLAVFLIYKFKRKIPWINIYAQVQHDKEQEMIGSVSQSENAPKITLSDFTEPEELLDKELDTRVIGGIATIANSESTKEIPNCTSV

SEQ ID NO: 29765 - protein, 48 aa, Homo sapiens
LGHGGRVLIAWPPVPQGMLIFDLSCKVSFFCMLESRTLSHLGNTGLDA

SEQ ID NO: 29766 - protein, 16 aa, Homo sapiens
LIMAKGDSWLPVSRVT

SEQ ID NO: 29767 - protein, 377 aa, Homo sapiens
LVVVGVLGILGEGTHFPLGFCLVLHFSESDRFGKITRLAGEGRRVTHYSFAVPRSWPVDYFFPCVGMGMLASVYTDDEERGNVMGIALGGLAMGVLVGPPFGSVLYEFVGKTAPFLVLAALVLLDGAIQLFVLQPSRVQPESQKGTPLTTLLKDPYILIAAGSICFANMGIAMLEPALPIWMMETMCSRKWQLGVAFLPASISYLIGTNIFGILAHKMGRWLCALLGMIIVGVSILCIPFAKNIYGLIAPNFGVGFAIGMVDSSMMPIMGYLVDLRHVSVYGSVYAIADVAFCMGYAIGPSAGGAIAKAIGFPWLMTIIGIIDILFAPLCFFLRSPPAKEEKMAILMDHNCPIKTKMYTQNNIQSYPIGEDEESESD

SEQ ID NO: 29768 - protein, 21 aa, Homo sapiens
LNPEPASPKLVGQKDRQIPLA

SEQ ID NO: 29769 - protein, 95 aa, Homo sapiens
VKGAPAPILHPWPPACLLAAEQPPLPPRLPPARRSSAGSARLLLPTPMEIQKHKDNKKLPQGIIIVFRLQTHTTPQIYTQLKGKLRKFFKEPYSE

SEQ ID NO: 29770 - protein, 131 aa, Homo sapiens
LARPAAPNTGRAAAAALPGWPSPCWSREREGAGPRGQGSAPPWLPWRLEARDAGAMAGTRGLMLLGPGPVAGPRDVGTCRGRQMEIQKHKDNKKLPQGIIIVFRLQTHTTPQIYTQLKGKLRKFFKEPYSE

SEQ ID NO: 29771 - protein, 77 aa, Homo sapiens
VWIIYIHISVCIYIYIYIYIYSMGYFTFASWEPLSNGYHHSPTPFSKTHPEHWAHVFKKNVPHCPLETPFHLLGSVS

SEQ ID NO: 29772 - protein, 34 aa, Homo sapiens
LHRAVSQTRCQCLQHGAVDQEQVLPLFFISNLKL

SEQ ID NO: 29773 - protein, 86 aa, Homo sapiens [sequence omitted]

SEQ ID NO: 29774 - protein, 301 aa, Homo sapiens
LKVVCTHVPILKPMDLMVEASPRRIFANAHTYHINSISVNSDHETYLSADDLRINLWHLEITDRSFNIVDIKPANMEELTEVITAAEFHPHQCNVFVYSSSKGTIRLCDMRSSALCDRHSKFFEEPEDPSSRSFFSEIISSISDVKFSHSGRYMMTRDYLSVKVWDLNMESRPVETHQVHEYLRSKLCSLYENDCIFDKFECCWNGSDSAIMTGSYNNFFRMFDRDTRRDVTLEASRESSKPRASLKPRKVCTGGKRRKDEISVDSLDFNKKILHTAWHPVDNVIAVAATNNLYIFQDKIN

SEQ ID NO: 29775 - protein, 82 aa, Homo sapiens
LHLGVAFAGEVLCCLSDSVTVFPPRLSYLHGCLQLSQVLWGLSWNSFVVCSSASHSCIKKDSTKGEWHPCCCCARPEFPEGP

SEQ ID NO: 29776 - protein, 45 aa, Homo sapiens
LSLRLSHCVPSPPLLSPWLFAALPGTLGSELEFLCGLLFCFSLLY

SEQ ID NO: 29777 - protein, 87 aa, Homo sapiens
LVLLPETSLGLQPGEATSHWIHTRPHFSILETPSLDSRSVHDLPLVQFLISGLQRSSCARTQAQPRIPQTKYFLLSAPRGMCSEAAA

SEQ ID NO: 29778 - protein, 18 aa, Homo sapiens
LVPRRVSFDSPERGVCSQ

SEQ ID NO: 29779 - protein, 621 aa, Homo sapiens
LLRDASAGPGEVPAQAPRSTWRSAVMPLLAPAAATVFLEIWKRQRARVVLHWDLYVWDEEQEEMALQLINCPDYKLRPYQHSYLRSTVILVLTLLMICLMIGMAHVLVVYRVLASALFSSSAVPFLEEQVTTAVVVTGALVHYVTIIIMTKINRCVALKLCDFEMPRTFSERESRFTIRFFTLQFFTHFSSLIYIAFILGRINGHPGKSTRLAGLWKLEECHASGCMMDLFVQMAIIMGLKQTLSNCVEYLVPWVTHKCRSLRASESGHLPRDPELRDWRRNYLLNPVNTFSLFDEFMEMMIQYGFTTIFVAAFPLAPLLALFSNLVEIRLDAIKMVWLQRRLVPRKAKDIGQTGRAQDGRELGGLRPVGFPLARPAHLEKIISRISGRRQPPALLRRPRMRVEPGWEGTRSGRGRALCRLLPQTVRISEGLDAPKGDPGSASGWGWNRAAGLCPKTGHAETDRQQGSDGSWGAGCGERERGVREAPSLGPRLQGLTLGWEPRRWSGWGAQLRSSGRWRMRIPRFLPVHVRVRGAGAQRPCSAMAGDFLVNTAALGLQGDTTHRDTAGPVLAGGGGEGRTSRGTLSQTACPLLWCRDLAAGAGDHRCAGGHCQWDGHCLHI

SEQ ID NO: 29780 - protein, 77 aa, Homo sapiens
LVTEVRPSLQNVGRGCGWRSRPLISQACCPGTTHLAYAFQAPSHVTLGLAPSGATGQAGPGPKDLPVTGDCELGRQE

SEQ ID NO: 29781 - protein, 16 aa, Homo sapiens
LVSFIRASSSRPGTGT

SEQ ID NO: 29782 - protein, 16 aa, Homo sapiens
VEVAARRDYAAALQPG

SEQ ID NO: 29783 - protein, 30 aa, Homo sapiens
MGFGSPETASERPGVVAHTRNPNTSGGRRG

SEQ ID NO: 29784 - protein, 135 aa, Homo sapiens
LSPLRSEAWQDLHLRKAVCGLGVHTCRANLLPDGDLLWATLSEPGCPQLALQSTSVLGMSRNSGRGGSQRRPSIQPGSALCPYLHQVGSLPCIAWGLAGLGPALLWNWMFSGSPAFPHVNTVHNIVFKVQFKTQK

SEQ ID NO: 29785 - protein, 29 aa, Homo sapiens
MDSDWPLEAPCPDGVACHHCEVRLGRTCT

SEQ ID NO: 29786 - protein, 164 aa, Homo sapiens
VPAAAAEVGPRAGDGPAPGSQGTSVRSSCCQAEGGPGQAQVWSYLQPTGPSSGGPPLGTSYGKRVTDLVLLCVSAASVGPLRETAGGSSSSLSAEPAFSSLLLKSGPGRVRAYRPCLRSPGLQELRAAPARWRGRGRFSGRLAWTRTGLWKLPALTGLPVTTAK

SEQ ID NO: 29787 - protein, 750 aa, Homo sapiens
LPVFCRGLCTHRLGPQLPLGCPSTSLAFETPSVALSEFSEPSCGGESETAALGGGSRSVPAPWAGLVPSLSQQLPAAGLRSLRLLVLHSNLLASVPADLARLPLLTRLDLRDNQLRDLPPELLDAPFVRLQGNPLGEASPDAPSSPVAALIPEMPRLFLTSDLDSFPVTPQGCSVTLACGVRLQFPAGATATPITIRYRLLLPEPGLVPLGPHDALLSHVLELQPHGVAFQQDVGLWLLFTPPQARRCREVVVRTRNDNSWGDLETYLEEEAPQRLWAHCQVPHFSWFLVVSRPVSNACLVPPEGTLLCSSGHPGVKVIFPPGATEEPRRVSMQVVRMAGRELQALLGEPEAAVSPLLCLSQSGPPSFLQPVTVQLPLPSGITGLSLDRSRLHLLYWAPPAATWDDITAQVVLELTHLYARFQVTHFSWYWLWYTTKNCVGGLARKAWERLRLHRVNLIALQRRRDPEQVLLQCLPRNKVDATLRRLLERYRGPEPSDTVEMFEGEEFFAAFERGIDVDADRPDCVEGRICFVFYSHLKNVKEVYVTTTLDREAQAVRGQVSFYRGAVPVRVPEEAEAARQRKGADALWMATLPIKLPRLRGSEGPRRGAGLSLAPLNLGDAETGFLTQSNLLSVAGRLGLDWPAVALHLGVSYREVQRIRHEFRDDLDEQIRHMLFSWAERQAGQPGAVGLLVQALEQSDRQDVAEEVRAVLELGRRKYQDSIRRMGLAPKDPALPGSSAPQPPEPAQA

SEQ ID NO: 29788 - protein, 679 aa, Homo sapiens
LPVFCRGLCTHRLGPQLPLGCPSTSLAFETPSVALSEFSEPSCGGESETAALGGGSRSVPAPWAGLVPSLSQQLPAAGLRSLRLLVLHSNLLASVPADLARLPLLTRLDLRDNQLRDLPPELLDAPFVRLQGNPLGEASPDAPSSPVAALIPEMPRLFLTSDLDSFPVTPQGCSVTLACGVRLQFPAGATATPITIRYRLLLPEPGLVPLGPHDALLSHVLELQPHGVAFQQDVGLWLLFTPPQARRCREVVVRTRNDNSWGDLETYLEEEAPQRLWAHCQVPHFSWFLVVSRPVSNACLVPPEGTLLCSSGHPGVKVIFPPGATEEPRRVSMQVVRMAGRELQALLGEPEAAVSPLLCLSQSGPPSFLQPVTVQLPLPSGITGLSLDRSRLHLLYWAPPAATWDDITAQVVLELTHLYARFQVTHFSWSVPPSFLSPPPPVCTALLTPSSPRYWLWYTTKNCVGGLARKAWERLRLHRVNLIALQRRRDPEQVLLQCLPRNKVDATLRRLLERYRGPEPSDTVEMFEGEEFFAAFERGIDVDADRPDCVEGRICFVFYSHLKNVKEVYVTTTLDREAQAVRGQVSFYRGAVPVRVPEEAEAARQRKGADALWMATLPIKLPVGLRDSRGAGQDRGPGVTRVTWWSWGWSPGLNALFPSNRDFEGPRGHGGGLASPWHP

SEQ ID NO: 29789 - protein, 369 aa, Homo sapiens
LPVFCRGLCTHRLGPQLPLGCPSTSLAFETPSVALSEFSEPSCGGESETAALGGGSRSVPAPWAGLVPSLSQQLPAAGLRSLRLLVLHSNLLASVPADLARLPLLTRLDLRDNQLRDLPPELLDAPFVRLQGNPLGEASPDAPSSPVAALIPEMPRLFLTSDLDSFPVTPQGCSVTLACGVRLQFPAGATATPITIRYRLLLPEPGLVPLGPHDALLSHVLELQPHGVAFQQDVGLWLLFTPPQARRCREVVVRTRNDNSWGDLETYLEEEAPQVRATQACRWRVESCCPEPCTSAQSLTLAPSTLPRPSWILLPYVPGTFHPTPSLLDPASLCPWQLPPHPVPPGSCSLCPWHLPPRPVSPGSCSLCP

SEQ ID NO: 29790 - protein, 113 aa, Homo sapiens
LRLEAWAASWSSTWPPTGCRASQPLWVSSPCAPTHWPHGRVPEACLSSAGASAPTGLVHSCLLVVPPPPWPLRLPQWLCQSSLSPAVEESLKQLLWEAAAGVSQRRGLGWCQA

SEQ ID NO: 29791 - protein, 46 aa, Homo sapiens
VRPPGSRLCWLLAVPSSRRSDAPLSTGRGDPGGRSGRESWKRCFLS

SEQ ID NO: 29792 - protein, 86 aa, Homo sapiens
LPGTGCVSQNVPKACLVSTARALPGQSQLAQAPQRSRGPSSKGGRRSRAVGGPVGIRAPWSPPAGSRHRVGLHVDACEGESCGGGR

SEQ ID NO: 29793 - protein, 39 aa, Homo sapiens
LNTLGWWGCGKKRVCFFTSSTESAHYGCPLGSQNPQHER

SEQ ID NO: 29794 - protein, 81 aa, Homo sapiens
VSPFPPQASLPQPSERRRFRGSRAGGEKQTPSQQRGRMGAGELAKVTSSRGEPRLRKAGGLWARSRQKEQEGREGAQGWPA

SEQ ID NO: 29795 - protein, 45 aa, Homo sapiens
LESGRKLAKVTSSRGEPRLRKAGGLWARSRQKEQEGREGAQGWPA

SEQ ID NO: 29796 - protein, 26 aa, Homo sapiens
VALGGSLRLRFLIQKPAVTITTIVVT

SEQ ID NO: 29797 - protein, 58 aa, Homo sapiens
VITGVAEVSCVPRGRPRSQASAVQPGLGSALPSAPYGQRGQGRGPSSWPRPKDRIPGL

SEQ ID NO: 29798 - protein, 174 aa, Homo sapiens
LPGCLSAWSSPGLLSTILPVRPSARSSSVRQSSWFSPARPSARFSSGLLSAALFWGLLGAVLPGDSSAPFSSGHPGLFGAVLPGGSSARLSPGVLRRGSLRGPLAAVLFSPGAPQHGSPPRGPPWASSARHSPGGSSARHSPRGLLSAALSRRLLSAVLPDSPQRGPPHLSGRV

SEQ ID NO: 29799 - protein, 41 aa, Homo sapiens
LPPHPWVLHYYLLTDHHGLPALPPSQPWAAAVTPSPLQCMS

SEQ ID NO: 29800 - protein, 175 aa, Homo sapiens [sequence omitted]

SEQ ID NO: 29801 - protein, 231 aa, Homo sapiens
LLMGIPGLEHLHIWISIPFSAYTLALLGNCTLLLIIQADAALHEPIYLFLAMLAAIDLVLSSSALPKMLAIFWFRDREINFFACLVQMFFLHSFSIMESAVLLAMAFDRYVAICKPLHYTTVLTGSLITKIGMAAVARAVTLMTPLPFLLRCFHYCRGPVIARCYCEHMAVVRLAVGTLASTISMALLWPCLLECWIYSLSSYLISLSFRQFYNSPLRRPATKHLGHVSLT

SEQ ID NO: 29802 - protein, 74 aa, Homo sapiens
MGGRFFSVAQARVQWCDLSSLRPPPPGFRGFSCLSLQSSWDYDHVPPHLAYFCNYSSDGVLPCWPSWSRTPELK

SEQ ID NO: 29803 - protein, 270 aa, Homo sapiens
LNKWWWGGLLPQDPTPFCLCPQCLPSYLLPPLAPLLQVFSNEGQFKFRFGVRGRSPGQLQRPTGVAVDTNGDIIVADYDNRWVSIFSPEGKFKTKIGAGRLMGPKGVAVDRNGHIIVVDNKSCCVFTFQPNGKLVGRFGGRGATDRHFAGPHFVAVNNKNEIVVTDFHNHSVKVYSADGEFLFKFGSHGEGNGQFNAPTGVAVDSNGNIIVADWGNSRIQVFDSSGSFLSYINTSAEPLYGPQGLALTSDGHVVVADAGNHCFKAYRYLQ

SEQ ID NO: 29804 - protein, 159 aa, Homo sapiens
LNKWWWGGLLPQDPTPFCLCPQCLPSYLLPPLAPLLQVFSNEGQFKFRFGVRGRSPGQLQRPTGVAVDTNGDIIVADYDNRWVSIFSPEGKFKTKIGAGRLMGPKGVAVDRNGHIIVVDNKSCCVFTFQPNGKLVGRFGGRGATDRHFAGIGGQLQDLC

SEQ ID NO: 29805 - protein, 109 aa, Homo sapiens [sequence omitted]

SEQ ID NO: 29806 - protein, 1855 aa, Homo sapiens
LQNFLVNTINFCKKSSIYKTKCIKSHLRSLLDPHIYRVTNFPQAHFIMQWIFQSDSEQEQVNISQFSQLIEILKETQNNLMEVKVKSESPETVEEAQRKSTYEVSLALSCFLNYLQKTEQTDTQLLLLSIAAAAGYHVINNTFQSLLGCDELSFLLDEMQTAQNKYQELKNICSYRAQAFLVLTGLTATVGDTAISSEEKTQRMSLMRHHMGQSLSKEVAHVLTKPGADHDWENLEKDLRLLINGDYEEVTISSLQMEEVSKQSLFYGKKQPHEPHDNENNKWEMIKNGAFLDLLQHLGLEHYYPKKLSKANFHLIYKTSVYNTQPSSEQELPFYFLQKLLMMDYELRYLVFKDDRNTEHQVHPNASDQEDEAFDPYENFFEDSDSPTKSSSTEPSPHIHPVDIQMTIFHCADNFARQYILAKLSTCQFALPLLVPNPCTSQIEFSLWSLRQITRSWQEARKSPKGKNYYKNQQMCCVSTSIVSFVRVGNGLSASKSQIMNCLLSKRKHDVFFHRHCTGSRKDCLLMGGMVEICWFCPGGEDEDRFDNCVTFTNLHGDAKEHEQQLSFLKEVSTVIVVLMSASDDNEGNRKIVRNLWQSSRPLICLLDDKEATMTNISGQRMRMGIKNRNEAELTEELTTTIRHLLELSDTALSLEDCSQIAHQQGFLIDEDQRDCKEAKEKAQALMAFLGKMKLSQIKEKLLPLQGQLWHHWCKKDKELYHLREKGNQSIEQHKSEIETDKQIIRHEQLARALPLNDLMQSVLQFLQEHSEIHTKLYFLQWLSVFLDKLTAGHLEELHEKQKYWWSLVQTVKQKAPNSHSLICLQSEIEAISTEISDCTLGIEQLIREVGQIYEALEEASSIKKIFFSLPQIAADLMISGVPIELMDGDAAYVPLTWVAAVFDKVSEKLGDKRLFVLSILGLQSSGKSTVLNALFGLQFTVSAGKCTQGAYMQLLKVEETFTEELGFDFVLAVDTEGLRAPEHSNKSKDRDNELVTFVIGLANLTLINIFGENPSEMQDILQIVVQAFLRMKQVKIFPSCLFVHQNVGEATATDQTMDGRRRLEQKLDEMAAIAAEQEQCLDVTCFSDVIRFDVNTHVYYFAHLWDGNPPMAPPNPRYSHNVQQLKSRILMTATQESRGNIMKISDVKSRVQDLWRGLMNENFIFSFRNTQEVMAMNKLETMYNHWTWELRSHVLGLQNQLINQIQNGKIQTLEASTFEVLVTEKYEVVKQELEKYFNEGPCSKILIQCKANFENKLIVLKEKLISDSKRQANELISFKNQSQERLNKKKTDYEKELLEKSRKLALTVKGKELSEEELHEKFNQLWKKWVCDVSTTLPQVTEPDIDLDSENILWEYFKNKTNVVGLLTNSAEKFQINYDKHIKVNKKYNHIPMTLTVFEKEFINMTTDYIVSRFNKIINNMWKQQCGYNPNYFHEILKTIEEEVKSASTQKRYTFTNTFIIDLCVCLFQRARENFKEMHRAFKRANDPVNYLESKKDDFFTSFKISCQGATSIKTFVDVLWYKLTPAVSTTIWEDMTFKIAGDMRATCPAFNGNRTNLEKHILFSLAEEENFDNYWEYLHNSKSFFRSYIKNHIKRYCSDNGGEKMKTFFEKSLIDIKNTILSAIHESTSVAKDKSSTASEWLDLFCDCLGCNLIFPRRDLISIEHQEIKHTEFLKEAMSAALDLTMKKIEQNYSSKPIEAMVSKIEKMLSEHLCGCWKQCPSCGAICTNTIPTHEGDHSVPFHRPQAVNGEEWYETDDFVIDCCTSLVASDCLLVLRDGRNFPFKNYRQAGGDYAMWSITPDTSIQLYWKWFVSHFRSNLEEKYQKKFAGKGKIPNAWAKITKQDVLEDLKKQ

SEQ ID NO: 29807 - protein, 24 aa, Homo sapiens
VNSFYLPRPRRSLLLRFQHVLWLS

SEQ ID NO: 29808 - protein, 18 aa, Homo sapiens
MHLFPLADPEVYPLEISW

SEQ ID NO: 29809 - protein, 78 aa, Homo sapiens
MKGRAVLWIWESTAKISACPVAELIRVMTGRYRAHHRNAPSMLVCCVLSFISSQLKLALLTWCTQSKNCKKTGAKPLP

SEQ ID NO: 29810 - protein, 74 aa, Homo sapiens
VEKTVSIFHVKEVQKTGKQIQMEETSDKVCLSSQQSINHDSSNPHPASISRFKEVHAGGSLHFSRENGRTSELI

SEQ ID NO: 29811 - protein, 16 aa, Homo sapiens
LMIANSQIYLDSKFVH

SEQ ID NO: 29812 - protein, 38 aa, Homo sapiens
LFTNHSRMANKINFVNLPVKTKAQIHFGYKFTFRELRL

SEQ ID NO: 29813 - protein, 25 aa, Homo sapiens
MVHASHCWSRAPSASLHGTSVDGRA

SEQ ID NO: 29814 - protein, 28 aa, Homo sapiens
MLRTPRAASQRGGEAITPAVSEHYTDAR

SEQ ID NO: 29815 - protein, 37 aa, Homo sapiens
LQFPEASPAMRNACFHIVNCLGTNYHYQGDKLLLRGC

SEQ ID NO: 29816 - protein, 13 aa, Homo sapiens
LEDPNGHKEGLKD

SEQ ID NO: 29817 - protein, 11 aa, Homo sapiens
LETTSEREKYA

SEQ ID NO: 29818 - protein, 11 aa, Homo sapiens
MPEINQQPACT

SEQ ID NO: 29819 - protein, 30 aa, Homo sapiens
MKKDVFASPCAMIVNFLRPPQPCRTGVIAM

SEQ ID NO: 29820 - protein, 10 aa, Homo sapiens
LARAMYLRLT

SEQ ID NO: 29821 - protein, 13 aa, Homo sapiens
LAFRARAMYLRLT

SEQ ID NO: 29822 - protein, 67 aa, Homo sapiens
LSITLDVYKSASLLFSSLGRTFWSSSNSSSITCSKVSANDVKPLEPALGPFTLSRVPWVRTPGDTLL

SEQ ID NO: 29823 - protein, 34 aa, Homo sapiens
MMSSLLNLPWAHSRSPESHGSAHLEILYYSKEER

SEQ ID NO: 29824 - protein, 31 aa, Homo sapiens
LSHPVLQEILQVATWVHSVCVTRAGASPWPW

SEQ ID NO: 29825 - protein, 32 aa, Homo sapiens
VISAFPTEEILQVATWVHSVCVTRAGASPWPW

SEQ ID NO: 29826 - protein, 54 aa, Homo sapiens
LIPAPALATVQCSHCKLRMGEDKELQSLKKRGFSLLVSQNEQEIPQDLPSLLGH

SEQ ID NO: 29827 - protein, 210 aa, Homo sapiens
LFENRKKKNNIKLYVRRDFIMDNCEELIPEYLNFIRGVVDSEDLPLNISREMLQQSKILKVIRKNLVKKCLELFTELAEDKENCKKFYEQFSKNIKLGIQEDSQNRKKLSELLRYYTSASGDEMVSLKDYCTRMKEKQKHIYYITGETKDQVANSAFVERLGKHGLEVIYMIEPIDEYCVQQLKEFEGKTLVPVTKEGLELPEDEEKKKK

SEQ ID NO: 29828 - protein, 343 aa, Homo sapiens
MPEETQTQDQPMEEEEVETFAFQAEIAQLMSLIINTFYSNKEIFLRELISNSSDALDKIWYESLTDPSKLDSGKELHINLIPNKQDQTLTIVDTGIGMTKADLINNLGTIAKSGTKAFMEALQAGADISMIGQFGVSFYSAYLVAEKVTVITKHNDDEQYAWESSAGGSFTVRTDTGERMGRGTKVILHLKEDQTEYLEEQRIKEIVKKHSQLIGYPITLFVEKECDKEVSDDETEEKEDKEEEKEKEEKESKDKPEIEDVGSDEEEEKKDGDKKKKKTKEKYIDQEELNKTKPIWTRNPDDITNEEYGEFCKNLTNDWEDHLAVKHFSVEGQLEFRALLFVP

SEQ ID NO: 29829 - protein, 140 aa, Homo sapiens
LWPVEGLARGPILDLSYGIPVLHVKASLMIRLVGRVPREEGAWGCGCVMCSSVTTGLPLSSQPPVPSQTSSYSCMLPTSPSVNGRSYDTYTPPHMQTHMNSQPMGTSGTTSTGLISPGVSVPVQVPGSEPDMSQYWPRLQ

SEQ ID NO: 29830 - protein, 36 aa, Homo sapiens
MCPSLTHLFAASMERLGEHAWTIKHTHLRRDDEAFC

SEQ ID NO: 29831 - protein, 51 aa, Homo sapiens
LESPFRILVGAGRGRAPVRTPGCPLARLGLLRLKRWEEFPAACGAKKKVLS

SEQ ID NO: 29832 - protein, 66 aa, Homo sapiens
VPPRPTWTSPTKEVGGVPCSLRGQEESAKLRSRSRRTPGTRQEVSVRPQRIHMPGSPGDTKPALGN

SEQ ID NO: 29833 - protein, 43 aa, Homo sapiens
LTYSCSRRALHASLSSSLLWVTFSAGDLRFSKGDMPATLALAP

SEQ ID NO: 29834 - protein, 73 aa, Homo sapiens
LQIKLLVLQRRKLRPRQPKERQSMERSGKEQGVGGPRMEPQLCQVTNSCVTLDEFRSLSEPQFPYWSNGIMGY

SEQ ID NO: 29835 - protein, 39 aa, Homo sapiens
LLLLLFKDRKQVSGNAELKPGSLNVQLEVLPTTPLPLQS

SEQ ID NO: 29836 - protein, 92 aa, Homo sapiens
MQRRGQPLENHVALIHWQSAGIPASKVHNYCNMKKSRLGRSRAVRISQPLLSPRRCPLHLTERGAGLLQPQPQGPVRTPGPPSGSHPAAADN

SEQ ID NO: 29837 - protein, 36 aa, Homo sapiens
LALHTDNGLSSREELPGPSSGNWDMQPLVSRGMCIH

SEQ ID NO: 29838 - protein, 62 aa, Homo sapiens [sequence omitted]

SEQ ID NO: 29839 - protein, 122 aa, Homo sapiens
MMGGRAVASATVRDQPANAHPQRALVAPEQGCDIGWWSPLPVFSLCSSAAMVRSLFQAGGRLAIGQREQDLQTLGSPADLDNLPDSFLTSCHFGLKATNSGSAVCTKSNNEFLPPSRNRPKF

SEQ ID NO: 29840 - protein, 46 aa, Homo sapiens [sequence omitted]

SEQ ID NO: 29841 - protein, 155 aa, Homo sapiens [sequence omitted]

SEQ ID NO: 29842 - protein, 70 aa, Homo sapiens
VMGAHRVPAPPPPAPPSRWDPLLCRGGSRSGLPLCTLQKPLPFHLESLGADHTSSAWKPGAVSRETSSAL

SEQ ID NO: 29843 - protein, 626 aa, Homo sapiens
VGSTTLQRRKPFRPPSVHFAKASALPSRIPWRRSHFLCLETWSRLSRDVLRPVEGRFGSSCAVAAPLAGFQGLIECGYLAVDSPPSCWTPGGSNPAAPLPQALLPPRLPPTVLPFLGPGLSGELEMFTLPQKDFRAPTTCLGPTCMQDLGSSHGEDLEGECSRKLDQKLPELRGVGDPAMISSDTSYLSSRGRMIKWFWDSAEEGYRTYHMDEYDEDKNPSGIINLGTSENKLCFDLLSWRLSQRDMQRVEPSLLQYADWRGHLFLREEVAKFLSFYCKSPVPLRPENVVVLNGGASLFSALATVLCEAGEAFLIPTPYYGAITQHVCLYGNIRLAYVYLDSEVTGLDTRPFQLTVEKLEMALREAHSEGVKVKGLILISPQNPLGDVYSPEELQEYLVFAKRHRLHVIVDEVYMLSVFEKSVGYRSVLSLERLPDPQRTHVMWATSKDFGMSGLRFGTLYTENQDVATAVASLCRYHGLSGLVQYQMAQLLRDRDWINQVYLPENHARLKAAHTYVSEELRALGIPFLSRGAGFFIWVDLRKYLPKGTFEEEMLLWRRFLDNKVLLSFGKAFECKEPGWFRFVFSDQVHRLCLGMQRVQQVLAGKSQVAEDPRPSQSQEPSDQRR

SEQ ID NO: 29844 - protein, 246 aa, Homo sapiens
MWLWVLAAQRFSSRLLPQSESIATLTSPVAVLATLRSGLPMRVLDLGSGNLEEVEIAGWDSRFRAGMRGREDASLEAEWRARRRRMVQETATRRPARPASYRDPGSNPPPFRKRPGSRYLAGKGRSGAKRAGHGEAAGTRGCRERQWHGARGWKRKQAVWPSPGARPIGRWVPRPGAARQGQAQGTTQPLQHPLGRSLQPSRPSLSAVAKTEAVVPVTGVACGGPRMRATNERLSKRRYFASILVY

SEQ ID NO: 29845 - protein, 334 aa, Homo sapiens
MNYFIDPVTIECGHSFCRPCFYLNWQDMAVLAQRSICKKTTRQRNLKTDICLKNMASFVRKASLWQFLRSEEQISGMHGETKKMFCEVDKSLLCLLCSNSQEHRNHRHCPIEWAAEERREELLKKMQSLWEKAWENLRNLNMETTRTRSWKDYVSLRIEAIRAEYQKMPAFLHEEEQHHLERLRKEDEDIFQQLNESKARMKHSRELLRGMYEDLKQMCHKADVELLQALGDILHRYESLLLQASEPVNPELSAGPITGLLDRLSGFKVDFTVQPERANSHIFLHGDLRSMNVGCDPQEDPDITAKSECFLVWGAQAFTSGKYYWEVHVGDSWN

SEQ ID NO: 29846 - protein, 70 aa, Homo sapiens
LCPEASAWPPSPVSYEEEIYDLAGRSKGQTLREQALRTNRQAPGGHHRTVAQKPLNGQRQLQPRPRSRPT

SEQ ID NO: 29847 - protein, 1030 aa, Homo sapiens
VLDLRGKKKREGEREKEEQERSRKEEEVAKNQLPCWICLSQHLGEALGFFLKGLIFRTPHLSSLLPASSLLWWLGCFFHDFLNLDWAVLCVKPISCDLLLTEVESTASILASVKEQEAQFEKLTRALEEERRHVSAQLERVRVSPQDANPLMANGTLTRRHQNGRFVGDADLERQKFSDLKLNGPQDHSHLLYSTIPRMQEPGQIVETYTEEDPEGAMSVVSVETSDDGTTRRTETTVKKVVKTVTTRTVQPVAMGPDGLPVDASSVSNNYIQTLGRDFRKNGNGGPGPYVGQAGTATLPRNFHYPPDGYSRHYEDGYPGGSDNYGSLSRVTRIEERYRPSMEGYRAPSRQDVYGPQPQVRVGGSSVDLHRFHPEPYGLEDDQRSMGYDDLDYGMMSDYGTARRTGTPSDPRRRLRSYEDMIGEEVPSDQYYWAPLAQHERGSLASLDSLRKGGPPPPNWRQPELPEVIAMLGFRLDAVKSNAAAYLQHLCYRNDKVKTDVRKLKGIPVLVGLLDHPKKEVHLGACGALKNISFGRDQDNKIAIKNCDGVPALVRLLRKARDMDLTEVITGTLWNLSSHDSIKMEIVDHALHALTDEVIIPHSGWEREPNEDCKPRHIEWESVLTNTAGCLRNVSSERSEARRKLRECDGLVDALIFIVQAEIGQKDSDSKLVENCVCLLRNLSYQVHREIPQAERYQEAAPNVANNTGPHAASCFGAKKGKGKKPIEDPANDTVDFPKRTSPARGYELLFQPEVVRIYISLLKESKTPAILEASAGAIQNLCAGRWTYGRYIRSALRQEKALSAIADLLTNEHERVVKAASGALRNLAVDARNKELIGKHAIPNLVKNLPGGQQNSSWNFSEDTVISILNTINEVIAENLEAAKKLRETQGIEKLVLINKSGNRSEKEVRAAALVLQTIWGYKELRKPLEKEGWKKSDFQVNLNNASRSQSSHSYDDSTLPLIDRNQKSDKKPDREEIQMSNMGSNTKSLDNNYSTPNERGDHNRTLDRSGDLGDMEPLKGTTPLMQKI

SEQ ID NO: 29848 - protein, 311 aa, Homo sapiens
LASICRPRLQASRGLSQFLPPHSPGQFLWSHPLADPGSRPITVDSSIGQVPTDPVSSTASVDLGSSPVPTALGPKPPFVALVSMPTSEYVGSRTDLTQPASRPFHNSWPTPVATSTSLAPMVSNFRLAPSHHSPRPASDSRLVFVTQHPTNSGPSCALADPGYRPTSLDPVARLAIMDKVSRTISEDSGSRSAPVYQDPRPISPDSGSSPAPVPGQSPWTQMPGLSQQTQTLCSFQNLASPCRHRLNARLRAMLAPVDPCSVQHLLLTGSVPALIEIGFTFIPTYPMKRSTPVDPGFRPNSTDPGNRPTIC

SEQ ID NO: 29849 - protein, 413 aa, Homo sapiens [sequence omitted]

SEQ ID NO: 29850 - protein, 33 aa, Homo sapiens
LLHDIPKLSFFYSTSTFLVESLLHHCFKDDKKK

SEQ ID NO: 29851 - protein, 78 aa, Homo sapiens
LLTGPVYSSSSPVSVVLCSLRSKEEPCEEGSLPQSLHTHQDTQVGGTGKLRAGQARAASLLAQLGPKMGKEQKLGVIE

SEQ ID NO: 29852 - protein, 61 aa, Homo sapiens
VMWEAQGETTLGTWTPPVLYIGLGLREGNNQMASLKPAFVNYFFLLLLEVSHLLLIINADV

SEQ ID NO: 29853 - protein, 27 aa, Homo sapiens
LGLREGKEERRASDAQGQVIALFPKFR

SEQ ID NO: 29854 - protein, 54 aa, Homo sapiens
LVWVEWGQAVEKGTPGSLRDSVLPGGTGCHESSRLRGRSLHYAPQEAVRGEQVT

SEQ ID NO: 29855 - protein, 253 aa, Homo sapiens [sequence omitted]

SEQ ID NO: 29856 - protein, 74 aa, Homo sapiens
LVSMVARLGRGSGRFAHPRAGGDWREAAVGCRALRRAWGVAVSVSELCSRRRGETREAIVATLRLLVSSQAVRP

SEQ ID NO: 29857 - protein, 22 aa, Homo sapiens
MAPRLCCLSYMIQAQNPNSGTV

SEQ ID NO: 29858 - protein, 24 aa, Homo sapiens
MESVLEDIRRYKGLVLLPRLVSRP

SEQ ID NO: 29859 - protein, 34 aa, Homo sapiens
MKQQLRVCCVSHFCILSPPSCNIIYLESTCPFVF

SEQ ID NO: 29860 - protein, 10 aa, Homo sapiens
MYLKVLADTD

SEQ ID NO: 29861 - protein, 10 aa, Homo sapiens
MESVLEDIRR

SEQ ID NO: 29862 - protein, 13 aa, Homo sapiens
LKLQESVLEDIRR

SEQ ID NO: 29863 - protein, 65 aa, Homo sapiens
MFSPQELTGEGMGQDPSLCKASVTVMFQVFLMTVCLYLTVLLTNNLLGSKGQHLLSKAQEEFEEN

SEQ ID NO: 29864 - protein, 8 aa, Homo sapiens
LENAGSGG

SEQ ID NO: 29865 - protein, 15 aa, Homo sapiens
LNDFLIQEQLVAIYH

SEQ ID NO: 29866 - protein, 41 aa, Homo sapiens
VLFFQMFSPQELTGEGMGQDPSLCKASVTVMFQEQLVAIYH

SEQ ID NO: 29867 - protein, 50 aa, Homo sapiens
LLVMFSPQELTGEGMGQDPSLCKASVTVMFQVFLMTVCLYLTEQLVAIYH

SEQ ID NO: 29868 - protein, 47 aa, Homo sapiens
VLFFQMFSPQELTGEGMGQDPSLCKASVTVMFQHLIIYPGEFSCLPG

SEQ ID NO: 29869 - protein, 57 aa, Homo sapiens
LSAGFTRTLEPKRALLLHPQELTGEGMGQDPSLCKASVTVMFQHLIIYPGEFSCLPG

SEQ ID NO: 29870 - protein, 65 aa, Homo sapiens
MSYWAPVCRIYAHVGTEESSVVAMFSPQELTGEGMGQDPSLCKASVTVMFQHLIIYPGEFSCLPG

SEQ ID NO: 29871 - protein, 56 aa, Homo sapiens
VLFFQMFSPQELTGEGMGQDPSLCKASVTVMFQVGVHGLCSYRGDLVDNHSMMNTK

SEQ ID NO: 29872 - protein, 66 aa, Homo sapiens
LSAGFTRTLEPKRALLLHPQELTGEGMGQDPSLCKASVTVMFQVGVHGLCSYRGDLVDNHSMMNTK

SEQ ID NO: 29873 - protein, 74 aa, Homo sapiens [sequence omitted]

SEQ ID NO: 29874 - protein, 18 aa, Homo sapiens
LSAGFTRTLEPKRALLLQ

SEQ ID NO: 29875 - protein, 19 aa, Homo sapiens
LADKVLCVASRLKSSSGAL

SEQ ID NO: 29876 - protein, 7 aa, Homo sapiens
LARATGG

SEQ ID NO: 29877 - protein, 14 aa, Homo sapiens
LCEHSIARTMPSVL

SEQ ID NO: 29878 - protein, 33 aa, Homo sapiens
LLVVSGFVVFIAVTLLYFVFFFYFLLSDCANIA

SEQ ID NO: 29879 - protein, 8 aa, Homo sapiens
LSFSFIFF

SEQ ID NO: 29880 - protein, 13 aa, Homo sapiens
MVVHACSSSYPGG

SEQ ID NO: 29881 - protein, 464 aa, Homo sapiens
LSGGRGPGGAGAAVGMASGSRWRPTPPPLLLLLLLALAARADGLEFGGGPGQWARYARWAGAASSGELSFSLRTNATRALLLYLDDGGDCDFLELLLVDGRLRLRFTLSCAEPATLQLDTPVADDRWHMVLLTRDARRTALAVDGEARAAEVRSKRREMQVASDLFVGGIPPDVRLSALTLSTVKYEPPFRGLLANLKLGERPPALLGSQGLRGATADPLCAPARNPCANGGLCTVLAPGEVGCDCSHTGFGGKFCSEEEHPMEGKEEFVATFKGNEFFCYDLSHNPIQSSTDEITLAFRTLQRNGLMLHTGKSADYVNLSLKSGAVWLVINLGSGAFEALVEPVNGKFNDNAWHDVRVTRNLRQHAGIGHAMVNKLHYLVDITLIVLPFGLPWVFLTVRFSLFCFLSLFGFLVVLLFQLFFASWTIFRFCFSFSFPLSLFFLFWSKLKYKRQMEIEEFGLSLL

SEQ ID NO: 29882 - protein, 71 aa, Homo sapiens [sequence omitted]

SEQ ID NO: 29883 - protein, 13 aa, Homo sapiens
VRWSVWKEEGRER

SEQ ID NO: 29884 - protein, 15 aa, Homo sapiens
LPSCAFLGEVLSLMK

SEQ ID NO: 29885 - protein, 8 aa, Homo sapiens
MAGLVWAL

SEQ ID NO: 29886 - protein, 97 aa, Homo sapiens [sequence omitted]

SEQ ID NO: 29887 - protein, 45 aa, Homo sapiens
VGVVGDGEKGTAWHRSRGRCSVGDGGMQLGTGTGRDEGEEGERVG

SEQ ID NO: 29888 - protein, 17 aa, Homo sapiens
LLCYKVGKTEEVLTENR

SEQ ID NO: 29889 - protein, 31 aa, Homo sapiens
MGIVGREWARCLYYMCDLKTLLGSELRLLNW

SEQ ID NO: 29890 - protein, 11 aa, Homo sapiens
MYGEVVSGMLL

SEQ ID NO: 29891 - protein, 33 aa, Homo sapiens
LSSKLIRIVVLLCYISRPLSHCLHNDFGCIFIL

SEQ ID NO: 29892 - protein, 78 aa, Homo sapiens
LACKLPLSPGWDCSVLALLFCVTSWGVRFCLQETNFGRRMEATASLCAEKEGACFKGSSKGGLFYSPGPVCLRRGDKG

SEQ ID NO: 29893 - protein, 67 aa, Homo sapiens
VLGRSHCAAHLVNLLSVLMASPRWGTAVCRIQGPLSACNSFPWMPQKQSRPPFLSYPFALLFTPAPL

SEQ ID NO: 29894 - protein, 13 aa, Homo sapiens
MVLSPATGMLKKN

SEQ ID NO: 29895 - protein, 77 aa, Homo sapiens
MCRSFPPQEYININPYFLMELVWFRFLHLNLLPRGVCCGICVCVRRGMVLSEPTSCGQRALSCEGGCHSGRVQFRRP

SEQ ID NO: 29896 - protein, 12 aa, Homo sapiens
LPLPSFPASPGA

SEQ ID NO: 29897 - protein, 111 aa, Homo sapiens
VPSVRSSHFLLGPSPFSVAGCLPAWRWTFHVTGISMYILVWSVSTLNFVSSSISLYRQSSQTHLKRLFLRILNLPKGSPMDGFLEVYKCSEIVFFCGKHNFHLLVRAQKRS

SEQ ID NO: 29898 - protein, 44 aa, Homo sapiens
LYPLNNIKHSIPSSLSNPILLSVSVSLTIPSTSYQLNHEVFVCL

SEQ ID NO: 29899 - protein, 40 aa, Homo sapiens
MTSFPLGRYPGVGLLDQMVLNIFSLDLFLEILGSSFCCCC

SEQ ID NO: 29900 - protein, 16 aa, Homo sapiens
LLCFLLHLALFTSICI

SEQ ID NO: 29901 - protein, 55 aa, Homo sapiens
VSPTFFSILPCCPPEWVSSFAYLSMRVSVVHILYDAPYMKLKFLLVAIFDLSCMQ

SEQ ID NO: 29902 - protein, 23 aa, Homo sapiens
LSSVCEFSIHGLNADKAPRVQDI

SEQ ID NO: 29903 - protein, 10 aa, Homo sapiens
MDGAVECMNL

SEQ ID NO: 29904 - protein, 26 aa, Homo sapiens
LRGSLLHPSGCRAEAPRGSVQRRQHL

SEQ ID NO: 29905 - protein, 19 aa, Homo sapiens
LYTARHHPAWHLPRWTYYL

SEQ ID NO: 29906 - protein, 69 aa, Homo sapiens
LINNKSSLHIKEINPFQIHSYFSLIFKFYCNILLFSLYIYVYIYICIYIYIHIYIHIYILIFFYGSWIL

SEQ ID NO: 29907 - protein, 36 aa, Homo sapiens
VDHMRRLGVRGQPGQHSENLSLLKIQKLVRHGGARL

SEQ ID NO: 29908 - protein, 12 aa, Homo sapiens
VVHVCNTSFSGG

SEQ ID NO: 29909 - protein, 94 aa, Homo sapiens
LPPGPCGPAPAFCGYEFYSHKYLWANPLLYLKAAFGLQPHWPEGRASHLALSLPCAPDGSRAAVFPWPCQHHCFYFCSLAECSGSWKPVARFPA

SEQ ID NO: 29910 - protein, 12 aa, Homo sapiens
LGPGALVTWTPG

SEQ ID NO: 29911 - protein, 25 aa, Homo sapiens
MQDCASCSVCWSDFMLLGQDMHVPC

SEQ ID NO: 29912 - protein, 36 aa, Homo sapiens
LGGREGGAEPPQVFLLLSAAHGRTQVLLFTFPSVKE

SEQ ID NO: 29913 - protein, 104 aa, Homo sapiens
LGVSLTGCPRSLCLRRQSHSLSWSTLKGHLNSLSMAICLVSTFRRAWKLKNGRKISVRAVGGWRQLGGRRSEWATGSQRPPGLRRGAALWCGIEAFSKSGFSRF

SEQ ID NO: 29914 - protein, 70 aa, Homo sapiens
LRRFPRVGFHVSKISQADSPCCSDFSNKKAKRVAVLGASRRTASSWGRKSAILPLLNRPCKAGAQLRNGK

SEQ ID NO: 29915 - protein, 8 aa, Homo sapiens
LLSVKFLT

SEQ ID NO: 29916 - protein, 12 aa, Homo sapiens
LEDRSTGRRRKE

SEQ ID NO: 29917 - protein, 8 aa, Homo sapiens
LDKIALKK

SEQ ID NO: 29918 - protein, 11 aa, Homo sapiens
LDFELRLFFKS

SEQ ID NO: 29919 - protein, 17 aa, Homo sapiens
MASLWVFFFYTNLRKTK

SEQ ID NO: 29920 - protein, 21 aa, Homo sapiens
MTCFYFLTLNSFCKCRVWMCN

SEQ ID NO: 29921 - protein, 15 aa, Homo sapiens
VGAKYVFSSFSLRSV

SEQ ID NO: 29922 - protein, 9 aa, Homo sapiens
LIKNCDSSA

SEQ ID NO: 29923 - protein, 12 aa, Homo sapiens
LMRTLSAYAKKF

SEQ ID NO: 29924 - protein, 14 aa, Homo sapiens
LHLQYCMLGISAYF

SEQ ID NO: 29925 - protein, 17 aa, Homo sapiens
MLLLKFTCCDVNCVENH

SEQ ID NO: 29926 - protein, 18 aa, Homo sapiens
VIFSALFMCGFLSPLPWS

SEQ ID NO: 29927 - protein, 43 aa, Homo sapiens
VLEGEGKGESGQPLFPSFSRSLLKARSPHKQLLCHIATPCLLI

SEQ ID NO: 29928 - protein, 2089 aa, Homo sapiens
LLAPSRGRAPLPRWGRPWREREAGPRGPQAPDGAWAGGRPHEGPGRGGAGSSGGAMGSQVLQILRQGVWASLTGGWFFDPHQSTFSNCFHLYVWIFLLIFPFLLYMVLPPSLMVAGVYCLVVAVIFATIKTVNYRLHAMFDQGEIVEKRSSTMGELEEEPAQGDSNPPRDPGVEMTVFRKVSSTPPVRCSSQHSVFGFNQVSELLPRMEDSGPLRDIKELVREQGSNNVIVTSADREMLKLSSQEKLIGDLPQTPPGAVPDPSLASTDSSEPSPLAGDGAPWSGSSMADTPMSPLLKGSLSQELSKSFLTLTQPDRALVRTSSRREQRRGAGGYQPLDRRGSGEPTPQKAGSSDSCFSGTDRETLSSFKSEKTNSTHLDSPPGGPAPEGSDTDPPSEAELPASPDAGVPSDDTLRSFDTVIGAGTPPGLAEPLLVVRPKDLALLRPSKRQPPLRRHSPPGRAPRRPLLEGGGFFEDEDTSEGSELSPASSLRSQRRYSTDSSSSTSCYSPESSRGAAGGPRKRRAPHGAEEGTAVPPKRPYGTQRTPSTASAKTHARVLSMDGAGGDVLRPPLAGCKAELEAQVGVEQAASEPVVLPAEARRGPAANQPGWRGELQEEGAVGGAAEETGRRDRSSSVRRTQAIRRRHNAGSNPTPPASVMGSPPSSLQEAQRGRAASHSRALTLPSALHFASSLLLTRAGANVHEACTFDDTSEGAVHYFYDESGVRRSYTFGLAGGGYENPVGQQGEQTANGAWDRHSHSSSFHSADVPEATGGLNLLQPRPVVLQGMQVRRVPLEIPEEQTLMEEAPPRAQHSYKYWLLPGRWTSVRYERLALLALLDRTRGVLENIFGVGLSSLVAFLGYLLLLKGFFTDIWVFQFCLVIASCQYSLLKSVQPDAASPMHGHNWVIAYSRPVYFCICCLLIWLLDALGSAQPFPPVSLYGLTLFSASFFFCARDVATVFTLCFPFVFLLGLLPQVNTCLMYLLEQIDMHGFGGTAATSPLTAVFSLSRSLLAAALLYGFCLGAIKTPWPEQHVPVLFSVFCGLLVALSYHLSRQSSDPTVLWSLIRSKLFPELEERSLETARAEPPDPLPDKMRQSVREVLHSDLVMCVVIAVLTFAISASTVFIALKSVLGFVLYALAGAVGFFTHYLLPQLRKQLPWFCLSQPVLKPLEYSQYEVRGAAQVMWFEKLYAGLQCVEKYLIYPAVVLNALTVDAHTVVSHPDKYCFYCRALLMTVAGLKLLRSAFCCPPQQYLTLAFTVLLFHFDYPRLSQGFLLDYFLMSLLCSKLWDLLYKLRFVLTYIAPWQITWGSAFHAFAQPFAVPHSAMLFVQALLSGLFSTPLNPLLGSAVFIMSYARPLKFWERDYNTKRVDHSNTRLVTQLDRNPGADDNNLNSIFYEHLTRSLQHTLCGDLVLGRWGNYGPGDCFVLASDYLNALVHLIEVGNGLVTFQLRGLEFRGTYCQQREVEAITEGVEEDEGCCCCEPGHLPRVLSFNAAFGQRWLAWEVTASKYVLEGYSISDNNAASMLQVFDLRKILITYYVKSIIYYVSRSPKLEVWLSHEGITAALRPVRVPGYADSDPTFSLSVDEDYDLRLSGLSLPSFCAVHLEWIQYCASRRSQPVDQDWNSPLVTLCFGLCVLGRRALGTASHSMSASLEPFLYGLHALFKGDFRITSPRDEWVFADMDLLHRVVAPGVRMALKLHQDHFTSPDEYEEPAALYDAIAANEERLVISHEGDPAWRSAILSNTPSLLALRHVLDDASDEYKIIMLNRRHLSFRVIKVNRECVRGLWAGQQQELVFLRNRNPERGSIQNAKQALRNMINSSCDQPLGYPIYVSPLTTSLAGSHPQLRALWGGPISLGAIAHWLLRTWERLHKGCGAGCNSGGNVDDSDCSGGGGLTSLSNNPPVAHPTPENTAGNGDQPLPPGPGWGPRSSLSGSGDGRPPPLLQWPPPRLPGPPPASPIPTEGPRTSRPPGPGLLSSEGPSGKWSLGGRKGLGGSDGEPASGSPKGGTPKSQAPLDLSLSLSLSLSPDVSTEASPPRASQDIPCLDSSAPESGTPMGALGDWPAPIEERESPAAQPLLEHQY

SEQ ID NO: 29929 - protein, 89 aa, Homo sapiens
VSSIMDSLQLNQNNAPDTSPCMALALSLCLTPAFEGLAFLPYRGLCRLFPCSTMAEGNQCNSTGSLQDPEGVWSGTSLLSLFSSALIVG

SEQ ID NO: 29930 - protein, 35 aa, Homo sapiens
VCLCEAQKLTSSALQAAAHLVLHGLIASQDLVFQL

SEQ ID NO: 29931 - protein, 142 aa, Homo sapiens
VPSARPSARRHCPSQPSRQSRGPRGCRGPNPRMLPCASCLPGSLLLWALLLLLLGSASPQDSEEPDSYTECTDGYEWDPDSQHCRGVCAWGTKHPQEPGKGLIAAFQGTAPPPRTAVGAQQPVLCPALLHRGQLWLSGGQLS

SEQ ID NO: 29932 - protein, 89 aa, Homo sapiens [sequence omitted]

SEQ ID NO: 29933 - protein, 75 aa, Homo sapiens
LSALTSHRKWQGYRCSGPRVETAALKSLELQGLPFKQACSLSPGCEKLEKNPAAPKGELVIKITDYWAGSGGSRL

SEQ ID NO: 29934 - protein, 230 aa, Homo sapiens
MNKPSDGRPKYLVVNADEGEPGTCKDREILRHDPHKLLEGCLVGGRAMGARAAYIYIRGEFYNEASNLQVAIREAYEAGLIGKNACGSGYDFDVFVVRGAGAYICGEETALIESIEGKQGKPRLKPPFPADVGVFGCPTTVANVETVAVSPTICRRGGTWFAGFGRERNSGTKLFNISGHVNHPCTVEEEMSVPLKELIEKHAGTDRPGHSCGDRHGPLDGHRESHRPPH

SEQ ID NO: 29935 - protein, 102 aa, Homo sapiens
VWSARRRLQNQTSFIVDQVNFTLNKNSTVFSGVSCTGAGKGVAVSTPGPAFHMTVSPEASLRFIINRDRAGRALKRRIKFLLMGSVVLSPFTSEPQAHWWSC

SEQ ID NO: 29936 - protein, 68 aa, Homo sapiens
LALLLASSVLWQVTSSPQVSRFPHLLPLQTSARTLHATVSGTELTGSRGCSTSGNLLQHFTDCKRGTC

SEQ ID NO: 29937 - protein, 392 aa, Homo sapiens
MRAGWTRQQQVSHNAPHGAKTCVHYSLHFFAYSLLCGINILLKMSKRPKDTPVNISDKKKRKHLCLSIAQKVKLLEKLDSGVSVKHLTEEYGVGMTTIYDLKKQKDKLLKFYAESDEQILMKNRKTLHKAKNEDLDRVLKEWIRQRRSEHMPLNGMLIMKQAKIYHNELKIEGNCEYSTGWLQKFKKRHGIKFLKTCGNKASAGHEATEKFTGKFSNDDEQDGNFEGFSMSSEKKIMSDLLTYTKNIHPETVSKLEEEDIKDVFNSNNEAPVVHSLSNGEVTKMVLNQDDHDDNDNEDDVNTAEKVPIDDMVKMCDGLIKGLEQHAFITEQEIMSVYKIKERLLRQKASLMRQMTLKETFKKAIQRNASSSLQDPLLGPSTASDASSHLKIK

SEQ ID NO: 29938 - protein, 44 aa, Homo sapiens
MRPQILLLLALLTLGLAAQHQDKVPCKMVKSLTQMTPIPHTMES

SEQ ID NO: 29939 - protein, 1700 aa, Homo sapiens
VPGRPAEGPGAGLVTLPGQPITPGFISGPALLPHISPPLVHFARRSGWEHRHFRSWSRHCRRHFVSVEKEASVAAGSGRRSPARRRRFIPEVPPVSSPIPPPRSACGEAGAAREPGRGRGVGREAGYPERLQLQLQRTSEGGRGAMSEQTPAEAGAAGAREDACRDYQSSLEDLTFNSKPHINMLTILAEENLPFAKEIVSLIEAQTAKAPSSEKLPVMYLMDSIVKNVGREYLTAFTKNLVATFICVFEKVDENTRKSLFKLRSTWDEIFPLKKLYALDVRVNSLDPAWPIKPLPPNVNTSSIHVNPKFLNKSPEEPSTPGTVVSSPSISTPPIVPDIQKNLTQEQLIRQQLLAKQKQLLELQQKKLELELEQAKAQLAVSLSVQQETSNLGPGSAPSKLHVSQIPPMAVKAPHQVPVQSEKSRPGPSLQIQDLKGTNRDPRLNRISQHSHGKDQSHRKEFLMNTLNQSDTKTSKTIPSEKLNSSKQEKSKSGEKITKKELDQLDSKSKSKSKSPSPLKNKLSHTKDLKNQESESMRLSDMNKRDPRLKKHLQDKTDGKDDDVKEKRKTAEKKDKDEHMKSSEHRLAGSRNKIINGIVQKQDTITEESEKQGTKPGRSSTRKRSRSRSPKSRSPIIHSPKRRDRRSPKRRQRSMSPTSTPKAGKIRQSGAKQSHMEEFTPPSREDRNAKRSTKQDIRDPRRMKKTEEERPQETTNQHSTKSGTEPKENVENWQSSKSAKRWKSGWEENKSLQQVDEHSKPPHLRHRESWSSTKGILSPRAPKQQQHRLSVDANLQIPKELTLASKRELLQKTSERLASGEITQDDFLVVVHQIRQLFQYQEGVREEQRSPFNDRFPLKRPRYEDSDKPFVDSPASRFAGLDTNQRLTALAEDRPLFDGPSRPSVARDGPTKMIFEGPNKLSPRIDGPPTPASLRFDGSPGQMGGGGPLRFEGPQGQLGGGCPLRFEGPPGPVGTPLRFEGPIGQAGGGGFRFEGSPGLRFEGSPGGLRFEGPGGQPVGGLRFEGHRGQPVGGLRFEGPHGQPVGGLRFDNPRGQPVGGLRFEGGHGPSGAAIRFDGPHGQPGGGIRFEGPLLQQGVGMRFEGPHGQSVAGLRFEGQHNQLGGNLRFEGPHGQPGVGIRFEGPLVQQGGGMRFEGPSVPGGGLRIEGPLGQGGPRFEGCHALRFDGQPGQPSLLPRFDGLHGQPGPRFERTPGQPGPQRFDGPPGQQVQPRFDGVPQRFDGPQHQQASRFDIPLGLQGTRFDNHPSQRLESVSFNQTGPYNDPPGNAFNAPSQGLQFQRHEQIFDSPQGPNFNGPHGPGNQSFSNPLNRASGHYFDEKNLQSSQFGNFGNIPAPMTVGNIQASQQVLSGVAQPVAFGQGQQFLPVHPQNPGFVQNPSGALPKAYPDNHLSQVDVNELFSKLLKTGILKLSQTDSATTQVSEVTAQPPPEEEEDQNEDQDVPDLTNFTVEELKQRYDSVINRLYTGIQCYSCGMRFTTSQTDVYADHLDWHYRQNRTEKDVSRKVTHRRWYYSLTDWIEFEEIADLEERAKSQFFEKVHEEVVLKTQEAAKEKEFQSVPAGPAGAVESCEICQEQFEQYWDEEEEEWHLKNAIRVDGKIYHPSCYEDYQNTSSFDCTPSPSKTPVENPLNIMLNIVKNELQEPCDSPKVKEERIDTPPACTEESIATPSEIKTENDTVESV

SEQ ID NO: 29940 - protein, 205 aa, Homo sapiens [sequence omitted]

SEQ ID NO: 29941 - protein, 67 aa, Homo sapiens
LLSPLPPSPTLALQLQPRPLRERRKPSRSGCLGAQGSGRAPGLEDHDHMDHLTKWYMGTKWSFRKYI

SEQ ID NO: 29942 - protein, 693 aa, Homo sapiens
MKAFLDELKAENIKKFLYNFTQIPHLAGTEQNFQLAKQIQSQWKEFGLDSAELAHYDVLLSYPNKTHPNYISIINEDGNEIFNTSLFEPPPPGYENVSDIVPSFSAFSPQGMPEGDLVHVNYARTEDFFKLERDMKINCSGKIVIARYRKVFRGNKVKNAQLAGAKGVILYSDPADYFAPGVKSYPDGWNLPGGGVQRGNILNLNGAGDPLTPGYPANEYAYRHGIAEAVGLPSIPVHPVGYYDAQKLLEKMGGSAPPDSSWRGSLKVSYNVGPGFTGNFSTQKVKMHIHSTNEVTRIYNVIGTLRGAVEPDRYVILGGHRDSWVFGGIDPQSGAAVVHETVRSFGTLKKEGWRPRRTILFASWDAEEFGLLGSTEWAEDNSRLLQERGVAYINADSSIEGNYTLRVDCTPLMYSLVYNLTKELKSPDEGFEGKSLYESWTKKSPSPEFSGMPRISKLGSGNDFEVFFQRLGIASGRARYTKNWETNKFSGYPLYHSVYETYELVEKFYDPMFKYHLTVAQVRGGMVFELANSIVLPFDCRDYAVVLRKYADKIYNISMKHPQEMKTYSLSFDSLFSAVKNFTEIASKFSERLQDFDKSNPILLRMMNDQLMFLERAFIDPLGLPDRPFYRHVIYAPSSHNKYAGESFPGIYDALFDIESKVDPSKAWGDVKRQISVAAFTVQAAAETLSEVA

SEQ ID NO: 29943 - protein, 374 aa, Homo sapiens [sequence omitted]

SEQ ID NO: 29944 - protein, 128 aa, Homo sapiens
LSRETIEYKKVLDEQIQERENSKNEESKHNQELTSQLLAAENKCNLLEKQLEYMRNMIKHAEMERTSVLEKQVSLERERQHDQTHVQSQLEKLDLLEQEYNKLTTMQALAEVSACVFLLLTYIRVVFF

SEQ ID NO: 29945 - protein, 389 aa, Homo sapiens
LCAGAKPKLICEGNPYVLGIRDTDSAQEFQKQLTKAKRIMILGNGGIALELVYEIEGCEVIWAIKDKAIGNTFFDAGAAEFLTSKLIAEKSEAKIAYKRTRYTTEGRKKEARSKSKSDNVGSALGPDWHEGLNLKGTKEFSHKIHLEAMCEVKKIYLQDEFRILKKKSFTFPRDHTSVTTNTEMWPVYVELTNEKIYGCDFIVSATGVTPNIEPFLHGNSFDLGEDGGLKVDDHMHTSLPDIYAAGDICTTSWQLSPVWQQMRLWTQARQMGWYAAKCMAAASSGDSIDMDFSFELFAHVTKFFNYKVVLLGKYNAQGLGSDHELMLRCTKGQEYIKVVMQNGRMMGAFLIGETDLEETFENLILNQMNLSSYGEDLLDPNIDIEDYFD

SEQ ID NO: 29946 - protein, 45 aa, Homo sapiens
MGEENRAKIKIKSDTAASPEHFQHHRHTHARTHTNTHAHTHISFL

SEQ ID NO: 29947 - protein, 59 aa, Homo sapiens
MALLRAFSSSVAVTDKDTFELSTFLDSSKAPQHDRNELPEQRGIGGGLDVPLRPVGFGG

SEQ ID NO: 29948 - protein, 154 aa, Homo sapiens
VEAAHSPGEMTGLSMDGGGSPKGDVDPFYYGKPGPLRTLPEPSGPLPPSSGLSQPQVHALCPLSPLVTTGCCGQAAERDSCWERPPIPLLLPSLSGDYETVRNGGLIFAGLAFIVGLLILLSKWGGLQGRGADQGTSLLKAAEQAGFRELPREG

SEQ ID NO: 29949 - protein, 1064 aa, Homo sapiens
VSPCPPPTSRKHPTKALGKETNGEEENERLQEGAPVLALPPTWGPSGYQCPWRGFLAASPTKELWSLRTMDALNRNQIGPGCQTQTMVQKGPLDLIETGKGLKVQTDKPHLVSLGSGRLSTAITLLPLEEGRTVIGSAARDISLQGPGLAPEHCYIENLRGTLTLYPCGNACTIDGLPVRQPTRLTQGCMLCLGQSTFLRFNHPAEAKWMKSMIPAGGRAPGPPYSPVPAESESLVNGNHTPQTATRGPSACASHSSLVSSIEKDLQEIMDSLVLEEPGAAGKKPAATSPLSPMANGGRYLLSPPTSPGAMSVGSSYENTSPAFSPLSSPASSGSCASHSPSGQEPGPSVPPLVPARSSSYHLALQPPQSRPSGARSESPRLSRKGGHERPPSPGLRGLLTDSPAATVLAEARRATESPRLGGQLPVVAISLSEYPASGALSQPTSIPGSPKFQPPVPAPRNKIGTLQDRPPSPFREPPGSERVLTTSPSRQLVGRTFSDGLATRTLQPPESPRLGRRGLDSMRELPPLSPSLSRRALSPLPTRTTPDPKLNREVAESPRPRRWAAHGASPEDFSLTLGARGRRTRSPSPTLGESLAPHKGSFSGRLSPAYSLGSLTGASPCQSPCVQRKLSSGDLRVPVTRERKNSITEISDNEDDLLEYHRRQRQERLREQEMERLERQRLETILNLCAEYSRADGGPEAGELPSIGEATAALALAGRRPSRGLAGASGRSSEEPGVATQRLWESMERSDEENLKEECSSTESTQQEHEDAPSTKLQGEVLALEEERAQVLGHVEQLKVRVKELEQQLQESAREAEMERALLQGEREAERALLQKEQKAVDQLQEKLVALETGIQKERDKEAEALETETKLFEDLEFQQLERESRVEEERELAGQGLLRSKAELLRSIAKRKERLAILDSQAGQIRAQAVQESERLARDKNASLQLLQKEKEKLTVLERRYHSLTGGRPFPKTTSTLKEVYRSKMDGEATSPLPRTRSGPLPSSSGSSSSSSQLSVATLGRSPSPKSALLTQNGTGSLPRNLAATLQDIETKRQLALQQKGE

SEQ ID NO: 29950 - protein, 16 aa, Homo sapiens
VKREARIGDLMESESM

SEQ ID NO: 29951 - protein, 74 aa, Homo sapiens
LRRSGDPTPHQEFQCCMRLSTHVHAATSPSPHTSGCLFVLFVPELLLSGLFRFYPSFSLRVREEGSQDWGPDGE

SEQ ID NO: 29952 - protein, 150 aa, Homo sapiens
LKPCQPWCGSPLYTFGVLDRVKLGEKIVESFQPQGRGRWRSWAAFPSSISVPQDRGPFPHYITAPSHLTTLWPLCLVPFSPRQEAIPGACLIEAFPVPVSSCISFILHCHPLFPILCWTLKAPSPAKALSSPLRHLHTLPTSKAQILGSM

SEQ ID NO: 29953 - protein, 10 aa, Homo sapiens
VGAFMGVVFH

SEQ ID NO: 29954 - protein, 41 aa, Homo sapiens
LLRNGARNAFLCVSCLFVFQLREESIRQMECTCEDEETENK

SEQ ID NO: 29955 - protein, 37 aa, Homo sapiens
LQLLSAGLHIYATLCKSCASRNHKNIFLHLLHSLSAA

SEQ ID NO: 29956 - protein, 36 aa, Homo sapiens
LLKDCSESPPMHSPAAYQPTLPAAAVCRTSYLCHTV

SEQ ID NO: 29957 - protein, 13 aa, Homo sapiens
MLRCDWSDLHPDA

SEQ ID NO: 29958 - protein, 16 aa, Homo sapiens
MSTLQRCDWSDLHPDA

SEQ ID NO: 29959 - protein, 14 aa, Homo sapiens
VPSRCDWSDLHPDA

SEQ ID NO: 29960 - protein, 25 aa, Homo sapiens
LMSTPTQTSFRPFSRCDWSDLHPDA

SEQ ID NO: 29961 - protein, 42 aa, Homo sapiens
LDSRTITLLPPPHKNSQAATLLMSTPTQTSFRPFSSLLGEYF

SEQ ID NO: 29962 - protein, 57 aa, Homo sapiens
LDKGGAYAQKQDYLKEKRKGENTQRYSRGGHMKMEAETGVMSLQAKECQGLPAAMRS

SEQ ID NO: 29963 - protein, 22 aa, Homo sapiens
LLGMVPQEAVRAPLRFEWIQLS

SEQ ID NO: 29964 - protein, 14 aa, Homo sapiens
LSDFNLLMALAVLF

SEQ ID NO: 29965 - protein, 57 aa, Homo sapiens
MKSRSCQWFIPRRMHNVQSCMCMMSSMVLSYFKFLVHLHKSFLTSIFLTNFMHSVCL

SEQ ID NO: 29966 - protein, 31 aa, Homo sapiens
MYFHDRNWEKKWGMKFISISDLFFFFFFARL

SEQ ID NO: 29967 - protein, 16 aa, Homo sapiens
VIECIFMIEIGKKNGE

SEQ ID NO: 29968 - protein, 16 aa, Homo sapiens
MENYDFSINLIIIGIY

SEQ ID NO: 29969 - protein, 33 aa, Homo sapiens
LEKTAQSPPVSHPRYYLELLSYFPSFKVSKGDW

SEQ ID NO: 29970 - protein, 16 aa, Homo sapiens
LDLESDLQNKSTFKIK

SEQ ID NO: 29971 - protein, 12 aa, Homo sapiens
MNPTRRMIFSHT

SEQ ID NO: 29972 - protein, 31 aa, Homo sapiens
LYLNSCDIHFFPSMDMLINALVSKSQIAQMC

SEQ ID NO: 29973 - protein, 19 aa, Homo sapiens
LPLELSEQETIFSRNRKTQ

SEQ ID NO: 29974 - protein, 7 aa, Homo sapiens
MKLKQRK

SEQ ID NO: 29975 - protein, 21 aa, Homo sapiens
LLGMVPQEAVRAPLRFEWLVL

SEQ ID NO: 29976 - protein, 18 aa, Homo sapiens
MEAGLKFYIRSYLFQLVL

SEQ ID NO: 29977 - protein, 20 aa, Homo sapiens
LLGMVPQEAVRAPLRFEWLC

SEQ ID NO: 29978 - protein, 120 aa, Homo sapiens
LMRKATIYQVQNQGLSAKMEGNYASDSSEILAKGFKESAAGGAGGMSLPSPHPALPTSCLPNDSLVLALGDLALTSAKQLMQTKPPFAGLAKCTLKKEGRNFSKSSSGEVSYSPPPPAFF

SEQ ID NO: 29979 - protein, 86 aa, Homo sapiens
MRGICTMVGKKRPVASCNQTLRLSRSPGSKPRRKGAVWSRKIQLVADLCLMPAVRQQPPLQSFFLSLLFFSLPSPSSLKPRGASKD

SEQ ID NO: 29980 - protein, 34 aa, Homo sapiens
MTGLQALYVGARQGGGAARRAKWILRKGGKPSKS

SEQ ID NO: 29981 - protein, 79 aa, Homo sapiens
VLITPLASNHSISTCSKGHPPAEISAVVPVGWLMGSFPFSIPWKPSTGLNTTSLRLFLHPPHMLASPRLLGLIPRTTLL

SEQ ID NO: 29982 - protein, 29 aa, Homo sapiens
MEAGLKFYIRSYLFQAVHTASLRSVCQTY

SEQ ID NO: 29983 - protein, 35 aa, Homo sapiens
MEAGLKFYIRSYLFQVMVFFCNFPKPFASSSIANF

SEQ ID NO: 29984 - protein, 41 aa, Homo sapiens
MHSSQAPGGGWRHQTDRTKTSEGQPGGACGCRAHRLVFGQN

SEQ ID NO: 29985 - protein, 34 aa, Homo sapiens
LSCNWFSLTQLRDFFVAMMGSKITLLEAAGEKHS

SEQ ID NO: 29986 - protein, 38 aa, Homo sapiens
METVFFSDQFSNTMSFSVHMSISVEKKRNFATWELKTT

SEQ ID NO: 29987 - protein, 311 aa, Homo sapiens
METILEQQQCYHEEKEWLMDVMAKEMLTKKSMLWDQINSDHCTRATQDRYMEVSGNPRDLYDDKDGLRKEELGAISGPKEFSDFCNRLKQIKEFHRKHPNEIYVAMSVEFEELLKARENPSEEAQNSVEFTDEEGYGRYLDLHDCCLKYINLKASEKLDYITYLSILDQLFDIPKDRRNAEHKRYLEMLLEYLQDYTDRVKPLQDQNELSGKIQAEFEKKWENGIFPGWPKETSSALTQAGAHLDLSAFSSWEELASLGLDRLKSALLALGLKCGRIPEERAQRLFSTKGKSLESLDTSLFAKNPKSKGTK

SEQ ID NO: 29988 - protein, 25 aa, Homo sapiens
MFSAVLCVTVTKLPNNSNICLDDVC

SEQ ID NO: 29989 - protein, 92 aa, Homo sapiens
LQMSPQEAPRVAELHAPGLSLPQVPCVLSHGLWPRNVFSHFGLRSPKRSPETKLLELEFVCVRTCARGGEGVCFRLFYASLSPNSQIIVTFV

SEQ ID NO: 29990 - protein, 41 aa, Homo sapiens
LRGQARGEPSSALPCSLSYQIPCEDNLRTMTHPTTFPGASN

SEQ ID NO: 29991 - protein, 19 aa, Homo sapiens
LALPGNSIHAPGRPQTSRL

SEQ ID NO: 29992 - protein, 76 aa, Homo sapiens
VMPRGRRLGMVFAPPRPGQRQAGAPWVPERRKRRPDGDTFLLSFLSTTWLKTWRSQQYKESKSRSCAREQMNSSSC

SEQ ID NO: 29993 - protein, 93 aa, Homo sapiens
VMPRGRRLGMVFAPPRPGQRQAGAPWVPERRKRRPDGVSTVFPEPHVSTAQCRERQGLQGNYQTHSLSPGSLPSSGTEKAHHGLHSRTRQDRM

SEQ ID NO: 29994 - protein, 241 aa, Homo sapiens
LMEKRGESLDLGVRCKRGEERDRRPCWKPSRPGAARGGRGLWTVGGGGSPTETAESQQLGKPPEFWVSAHPGWLQVSCAHRASRRDASRWHPLQRFFARRGVRRPNPSVPSPLPKPPVPSAGSCEPLAPPTSASGASRSWVTQTLAEAGAYRGCRPAPGSAAGWPRSDRRARLPRKASKPCSPALPSLAACCPQGFLRSGTKRVMCKVLGPGAGVRGTAVECSEQAGVWAHCRPQLTATFS

SEQ ID NO: 29995 - protein, 188 aa, Homo sapiens
VDYYEVLGVQRHASPEDIKKAYRKLALKWHPDKNPENKEEAERKFKQVAEAYEVLSDAKKQDIYDKYGKEGLNGGGGGGSHFDSPFEFGFTFRNPDDVFREFFGGRDPFSFDFFEDPFEDFFGNRRGPRGSRSRGTGSFFSVFSGFPSFRSGFSSFDTGFTSFGSLGHGGLTSFSSTSFGGSGMGNFK

SEQ ID NO: 29996 - protein, 68 aa, Homo sapiens
LLRLFPDILQAREWLAGTWWPFSVFHRKNFLTQQTGPGAVSEVSNGTSRRAGCVWLLPLLVLHLLLKF

SEQ ID NO: 29997 - protein, 173 aa, Homo sapiens [sequence omitted]

SEQ ID NO: 29998 - protein, 52 aa, Homo sapiens
LSVHGKNTFPKEREALTEAAFLLSSGRRQHITTCHIEIGAHSAISPSVLSRA

SEQ ID NO: 29999 - protein, 69 aa, Homo sapiens
VELLLLVHALNPSLPQESEPQDKNHLLGSLLPCPPPFFLPLSFLFFLCSLEPSEKYQGTGVQLFLMIGH

SEQ ID NO: 30000 - protein, 46 aa, Homo sapiens
LPEPPISASSSFNLTEEAGLPGLEAGFPTLMMQSWKKPQECFRFCR

SEQ ID NO: 30001 - protein, 42 aa, Homo sapiens
VGMWQWECGSGDVAVRKTTDRLLGKQSKQVRRQAGVVRLRRR

SEQ ID NO: 30002 - protein, 23 aa, Homo sapiens
LGRKVYPSQKIRHLARYSVAMLL

SEQ ID NO: 30003 - protein, 31 aa, Homo sapiens
LRAGALWPPQAGTLQDHQEDCMPRSSLPKGK

SEQ ID NO: 30004 - protein, 66 aa, Homo sapiens
MHSFSAVSGLVSLSLEARNMQTAPRSCRWDFGVGTPAKKRSRRIYHKTNRLLLISTCAVCLSSSGH

SEQ ID NO: 30005 - protein, 128 aa, Homo sapiens [sequence omitted]

SEQ ID NO: 30006 - protein, 291 aa, Homo sapiens
LAKGPLALTTRGRVSQSRTPGPAPRPNAGEPEGRGLHRQVPPVPAARAPQSRTRSAQAKLALTMPVKGGTKCIKYLLFGFNFIFWLAGIAVLAIGLWLRFDSQTKSIFEQETNNNNSSFYTGVYILIGAGALMMLVGFLGCCGAVQESQCMLGLFFGFLLVIFAIEIAAAIWGYSHKDEVIKEVQEFYKDTYNKLKTKDEPQRETLKAIHYALNCCGLAGGVEQFISDICPKKDVLETFTVKSCPDAIKEVFDNKFHIIGAVGIGIAVVMIFGMIFSMILCCAIRRNREMV

SEQ ID NO: 30007 - protein, 228 aa, Homo sapiens
VALFKSAAGDQPTAACICIQRQVPPVPAARAPQSRTRSAQAKLALTMPVKGGTKCIKYLLFGFNFIFWLAGIAVLAIGLWLRFDSQTKSIFEQETNNNNSSFYTGVYILIGAGALMMLVGFLGCCGAVQESQCMLGLFFGFLLVIFAIEIAAAIWGYSHKDEVIKEVQEFYKDTYNKLKTKDEPQRETLKAIHYAVELLWFGWGRGTVYLRHLPQEGRTRNLHREVLS

SEQ ID NO: 30008 - protein, 49 aa, Homo sapiens
LFFCVPPMVGPLFTSAVSSFSCKKSLECTKLCLPQIENVKGTEDSGEEK

SEQ ID NO: 30009 - protein, 75 aa, Homo sapiens [sequence omitted]

SEQ ID NO: 30010 - protein, 208 aa, Homo sapiens
MDGPGFYTTRCLAPMMSEVIRILQEGVDLEKLDSLTTSFGFPVGAATLVDEVGVDVAKHMAEDLRKALGERFGGGNPELLTQMVSKGFLGRKFGKGFYIYQEGVKSKNLNSDVDSILVSLKMPPKSEVSPGEDIQFRLVTRFVNEAVMCLREGILATPAEGDIAAVFGLGFPPCFGGPFCFVALYGPQKIVARLKKYEAAYGKQFTPC

SEQ ID NO: 30011 - protein, 36 aa, Homo sapiens
LTPAAWLQITSEPSLRWSSLCEGAWRQTSRPAQGAR

SEQ ID NO: 30012 - protein, 65 aa, Homo sapiens
LSCLLGPLSLCGVYICFHKSVLFFSLFCLCISSNCLFKMPRIWTPSTSNRHWEGEGRKAECKMKW

SEQ ID NO: 30013 - protein, 90 aa, Homo sapiens
LFHIKQLNFLHFVDVFKNGFFYFSENQTNKTIDASVSKKAADSTSQCGKATGSDSSGVIDLTMDDEESGASQGTSIVIVLSNVLIPFFLS

SEQ ID NO: 30014 - protein, 138 aa, Homo sapiens
MDVAKKQKPELLNKITRNLGFGVGIEFHESFLVINSKNQYKLKTGMVFSISLGFSDLTNKEGKKPEEKTYALFLSDTVLMDEDGPATVLTSVKKKVKNVGIFLRNEDEEKEEEEKDEAEDLLGRGSRAALLTERTGMK

SEQ ID NO: 30015 - protein, 202 aa, Homo sapiens
VGKKKKKTKGPDAASKLPLVTPHTQCQLKLLKLERIKDYLLMEEEFIRNQEQMKPLEEKQEGKRSKVDDLRGTPMSVGILEEIIDDNHAIVSTSVGSEHYISILSFADKDLLEPGCSVRLNHKVHTMIGVLMDDMDPLVTVMKVEKAPQETYADTGGLDNQIREIKESVELPLTHPEYYEEMGIKPPRGSFSVVHLAQVKPC

SEQ ID NO: 30016 - protein, 462 aa, Homo sapiens
MCDECDMAFHIYCLDPPLSSVPSEDEWYCPECRNDASEVVLAGERLRESKKKAKMASATSSSQRDWDKGMACVGRTKECTIIPSNHYGPIPGIPVGTMWRFRVQVSESGVHRPHVAGIHGRSNDGAYSLVLAGGYEDDVDHGNFFTYTGSGGRELSGNKRTAEQSCDQKLTNTNRALALNCFAPINDQEGAEAKDWRSGKPVRVVRNVKGGKNSKYAPAEGNRYDGIYKVVKYWPEKGKSGFLVWRYLLRRDDDEPGPWTKEGKDRIKKLGLTMQYPEGYLEALANREREKENSKREEEEQQEGGFASPRTGKGKWKRKSAGGGPSRAGSPRRTSKKTKVEPYSLTAQQSSLIREDKSNAKLWNEVLASLKDRPASGSPFQLFLSKVEETFQCICCQELVFRPITTVCQHNVCKDCLDRSFRAQVFSCPACRYDLGRSYAMQVNQPLQTVLNQLFPGYGNGR

SEQ ID NO: 30017 - protein, 272 aa, Homo sapiens
VGVGKEEIQGGRRLRSKYFGVAESRRMWLWVLAAQRFSSRLLPQSESIATLTSPVAVLATLRSGLPMRVLDLGSGNLEEVEIAGWDSRFRAGMRGREDASLEAEWRARRRRMVQETATRRPARPASYRDPGSNPPPFRKRPGSRYLAGKGRSGAKRAGHGEAAGTRGCRERQWHGARGWKRKQAVWPSPGARPIGRWVPRPGAARQGQAQGTTQPLQHPLGRSLQPSRPSLSAVAKTEAVVPVTGVACGGPRMRATNERLSKRRYFASILVY

SEQ ID NO: 30018 - protein, 102 aa, Homo sapiens [sequence omitted]

SEQ ID NO: 30019 - protein, 592 aa, Homo sapiens
LDRGWYVPHVSWVLVWPATRVPCGQTLPGVRANYQRSGAGASVRVCACVCASAVEGGDQLLHTFNTALKRESERETGDAQIPPRSPKPTVPQIIVQSPKNRNRGNEQQLNMDEGIPHLQERQLLEHRDFIGLDYSSLYMCKPKRSMKRDDTKDTYKLPHRLIEKKRRDRINECIAQLKDLLPEHLKLTTLGHLEKAVVLELTLKHLKALTALTEQQHQKIIALQNGERSLKSPIQSDLDAFHSGFQTCAKEVLQYLSRFESWTPREPRCVQLINHLHAVATQFLPTPQLLTQQVPLSKGTGAPSAAGSAAAPCLERAGQKLEPLAYCVPVIQRTQPSAELAAENDTDTDSGYGGEAEARPDREKGKGAGASRVTIKQEPPGEDSPAPKRMKLDSRGGGSGGGPGGGAAAAAAALLGPDPAAAAALLRPDAALLSSLVAFGGGGGAPFPQPAAAAAPFCLPFCFLSPSAAAAYVQPFLDKSGLEKYLYPAAAAAPFPLLYPGIPAPAAAAAAAAAAAAAAAAFPCLSSVLSPPPEKAGAAAATLLPHEVAPLGAPHPQHPHGRTHLPFAGPREPGNPESSAQEDPSQPGKEAP

SEQ ID NO: 30020 - protein, 207 aa, Homo sapiens
LSEVQRFRRPRDPRRFPRATCKSCPGPGRRCVPARWQLATPLESPLCCGLPVAFGGSVCLVAYLGLFMLCVSYQVDERTCIQFSMKLLYFLLSALGLTVCVLAVAFAAHHYSQLTQFTCETTLDSCQCKLPSSEPLSRTFVYRDVTDCTSVTGTFKLFLLIQMILNLVCGLVCLLACFVMWKHRYQVFYVGVRICSLTASEGPQQKI

SEQ ID NO: 30021 - protein, 46 aa, Homo sapiens
LTQRLLCLKNCFRTRAFLCMLFLQLGKKNPRNVLNTQENATFQLHI

SEQ ID NO: 30022 - protein, 36 aa, Homo sapiens
VTTLSPLGETDLVLTTTDKGLQGPGRDMILKHVTSW

SEQ ID NO: 30023 - protein, 48 aa, Homo sapiens
VFHFVCIKLSCQNSDLRLLNRYLGNFFLITLNEKRQLYWAFWKQNILC

SEQ ID NO: 30024 - protein, 46 aa, Homo sapiens
LYDLDLYSFFSFLFKDEKEGPITKHIRLTAALILKNIGKYSECGRR

SEQ ID NO: 30025 - protein, 305 aa, Homo sapiens
LWRPEGGADTGAIREARQGRALSSRGDPKRRRLWDPRRVLVPQPLLGLPRSCLRPLPRTRLSRRLPASLGSLRFPRLPLAPPGTSPPPPPPPPRRPGWTRPRASATRFCHSMEDGLLEIMTKDGGDMPAPLEVSTVPAVGDVISGEYNGGMKELMEHLKAQLQALFEDVRAMRGALDEQASHIQVLSDDVCANQRAIVSMCQIMTTAPRQGGLGVVGGKGSFQSDPQEPETPSPGIGDSGLLGRDPEDEEEEEEEKEMPSPATPSSHCERPESPCAGLLGGDGPLVEPLDMPDITLLQLEGEASL

SEQ ID NO: 30026 - protein, 100 aa, Homo sapiens
LGQAPPHIRCGDATSAHVMAVARLGRKARNPPFRRWRASVTALPRVLADRTDPADGEGHGTEPLVFKMFFFYLSFKNKLGRSKIQNLPFASRNINMYSSE

SEQ ID NO: 30027 - protein, 83 aa, Homo sapiens
LPQQGSGAVDQAWVGNCQAEEAPPLKQKEQASNSRRSKGRQRVWVKSRALASSCHTSHLIHHSVVEFRLVTTSLHVPQEKGDN

SEQ ID NO: 30028 - protein, 39 aa, Homo sapiens
VGPLRPVSPATPAPLSWELRLLEKPGQWEAQLRAIDLSL

SEQ ID NO: 30029 - protein, 16 aa, Homo sapiens
VNHKNVVCLGCSVCLC

SEQ ID NO: 30030 - protein, 11 aa, Homo sapiens
VEGQGECVSLS

SEQ ID NO: 30031 - protein, 56 aa, Homo sapiens
LVEKATTKLEREPEEGRERQTKVKANHAEKCRQGSKAAVPGTNVAEGKTGTHRQRS

SEQ ID NO: 30032 - protein, 70 aa, Homo sapiens
LVEKATTKLEREPEEGRERQTKVKANHAEKCRQGSKAAVPGTNVAEGKTGTHRQRSDYAVGPCCKRDFAL

SEQ ID NO: 30033 - protein, 100 aa, Homo sapiens
LVEKATTKLEREPEEGRERQTKVKANHAEKCRQGSKAAVPGTNVAEGKTGTHRQRFMYFYFLKSDLVFHEEKGKSREREYRENNPGPSSPHERPENAGKT

SEQ ID NO: 30034 - protein, 34 aa, Homo sapiens
MQAREQGGSSRNKRGRGQDGHSQTEVYVFLFFKI

SEQ ID NO: 30035 - protein, 19 aa, Homo sapiens
LAREVLQPKPAITPKLVGA

SEQ ID NO: 30036 - protein, 35 aa, Homo sapiens
VERGSPELQTAARGPKESDVYKTRNATAASWQRKG

SEQ ID NO: 30037 - protein, 8 aa, Homo sapiens
LTRLCSGA

SEQ ID NO: 30038 - protein, 80 aa, Homo sapiens
MCVCVELRQARQRHRMREDEKESGRERGREGERESDSSARGGSTPRPPEMTSESFASRCLYLPGPAGTLPRRPHGQRVGN

SEQ ID NO: 30039 - protein, 98 aa, Homo sapiens
LYIIHSPPCLLSFLPTPFYPKHIHKKCAYHCAPQEKCWYWFSCNITDGLINDKCLSVKTRHLHTECNTHNFFFLCPDLFLLLPCDLKMSFNFLITLES

SEQ ID NO: 30040 - protein, 230 aa, Homo sapiens
LFQHIVREPTDNHHHKVPHSRTEGLKPREMISDDIIIYNVTDDNANEENIPVIPETGKLGYYIISIYHICICVYISLQDVMSDPSNCSQYPDIVVFEDDNEDEYAPAIQSGEQSEPARESLSSGSDGSNPLMSSAVQLNGSSSLTSEDPVTMMDSILNDNINLLGKVELLDYLDSTDCSLDDFQAMLSGRQFSIDPGLLVDSEKKGLETTKNNVVQSVWEEGRKSKSRPH

SEQ ID NO: 30041 - protein, 20 aa, Homo sapiens
MLYRRALPGTVSSLRSVPPR

SEQ ID NO: 30042 - protein, 72 aa, Homo sapiens [sequence omitted]

SEQ ID NO: 30043 - protein, 448 aa, Homo sapiens
MLRLPTVFRQMRLVSRVLAPHLTGAYAKDVKFGADARALMLQGIDLLADAVALTMGPKGRRTVIIEQSWGSPKVTKDGVTVAKSIDLKDKYKNIGAKLVQDVANNTNEETGDGPTTATVLARSIAKEGIEKISKGANPVEIRRGVMLVVDAVIAELKKQSKPVTTPEEIAQVATISANGDKEIGNISDAMKKVGRKGVITVKDGKTLNDELEIIEGIKFDRGYISPYFINTSKGQKCEFQDAYVLLSEKKISSVQSVVPALEIANAHRKPLVIIAEDVDGEALSTLVLNRLKVGLQDVAIKAPGFGDNRKNQLKDMAIATGGAVFGEEGLTLNLEDVQPHDLGNVGEVIVTKDDATLLKEKGDKAQIEKRIQEIIEQLDVTTSEYEKEKLNERLAKLSDVVAVLKVGGTSDVEVNEKKDRVRMPLMLQELLLKKALYWEGVVPCFDAF

SEQ ID NO: 30044 - protein, 10 aa, Homo sapiens
VYETMQKYKG

SEQ ID NO: 30045 - protein, 27 aa, Homo sapiens
VGTGGKRGMKVLEQKRPEKGPLHFPSL

SEQ ID NO: 30046 - protein, 10 aa, Homo sapiens
LAHVGSAEGA

SEQ ID NO: 30047 - protein, 48 aa, Homo sapiens
LLSSHTTSAVSLPMAVSTRVSSCGQSSTPPQTLTLTLLLSQHCRLARI

SEQ ID NO: 30048 - protein, 20 aa, Homo sapiens
VLDTIRNSKFSSEWGMGWGH

SEQ ID NO: 30049 - protein, 64 aa, Homo sapiens
MKWTQHVKTILSRSLAVKENRECAKEHTDTEQTGHLCNHMEVCLILKLKKLSWKTERPSPDDIV

SEQ ID NO: 30050 - protein, 63 aa, Homo sapiens
MKCGPVAPHCRFSSFLPPFRKCAKEHTDTEQTGHLCNHMEVCLILKLKKLSWKTERPSPDDIV

SEQ ID NO: 30051 - protein, 24 aa, Homo sapiens
MKWTQHVKTILSRSLAVKENRECE

SEQ ID NO: 30052 - protein, 29 aa, Homo sapiens
VAPHCRFSSFLPPFRKCKLRISNLHRDVF

SEQ ID NO: 30053 - protein, 21 aa, Homo sapiens
LGGVTQAGLWLLAVTRTTGGD

SEQ ID NO: 30054 - protein, 473 aa, Homo sapiens
LPVLRLCRPHSRPRPIFLRDSRPLVPPSSSRVLPAPSSCSRRLLGTQAGRRRAQPSKREQPWLRELQRSRVSDGARLRRCGTRSFPGSEEVLSSMARRSAFPAAALWLWSILLCLLALRAEAGPPQEESLYLWIDAHQARVLIGFEEDILIVSEGKMAPFTHDFRKAQQRMPAIPVNIHSMNFTWQAAGQAEYFYEFLSLRSLDKGIMADPTVNVPLLGTVPHKASVVQVGFPCLGKQDGVAAFEVDVIVMNSEGNTILQTPQNAIFFKTCQQAECPGGCRNGGFCNERRICECPDGFHGPHCEKALCTPRCMNGGLCVTPGFCICPPGFYGVNCDKANCSTTCFNGGTCFYPGKCICPPGLEGEQCEISKCPQPCRNGGKCIGKSKCKCSKGYQGDLCSKPVCEPGCGAHGTCHEPNKCQCQEGWHGRHCNKRYEASLIHALRPAGAQLRQHTPSLKKAEERRDPPESNYIW

SEQ ID NO: 30055 - protein, 107 aa, Homo sapiens
MWILSNLMGTSEEGNLLSTVSPTVKALFGKTRVSPIFPFSPRSPFQPLIPRTPGSPWGPVGPASPLGPGFPIGPMGPGKPVGPKGPMLPLGPSGPVGPTSPLFPFCP

SEQ ID NO: 30056 - protein, 66 aa, Homo sapiens
LGPIYYRDSNGAILVYDITDEDSFQKVKNWVKELRKMLGNEICLCIVGKHHYFFLKKKSSVSLMFY

SEQ ID NO: 30057 - protein, 283 aa, Homo sapiens
LRLHLATNPPKLSSPPPPPSFLPPPPPPFRLPSPPPPPISSFFSHYERLLMLKPSVTSAPTADMATLTVVQPLTLDRDVARAIELLEKLQESGEVPVHKLQSLKKVLQSEFCTAIREVYQYMHETITVNGCPEFRARATAKATVAAFAASEGHSHPRVVELPKTDEGLGFNVMGGKEQNSPIYISRIIPGGVAERHGGLKRGDQLLSVNGVSVEGEHHEKAVELLKAAKDSVKLVVRYTPKVLEEMEARFEKLRTARRRQQQQLLIQQQQQQQQQQTQQNHMS

SEQ ID NO: 30058 - protein, 48 aa, Homo sapiens
MVKNFLNMFYMFLIYLPLKEGWPEELKEPLILQDRPKHVILLYHMRFI

SEQ ID NO: 30059 - protein, 109 aa, Homo sapiens
VGASVTPSHIHTRARAHTHTHVHAHPHPRACIPCCFPGRHTGAHESLLASLQGGDPQNPAPGPNLGKKLLLCQQLLFGLRHSHLDPTLSRLLLLLPGRGSSKRRLVKTH

SEQ ID NO: 30060 - protein, 492 aa, Homo sapiens
LISQIKVLPVDLGITIPRKAGPLKQRTISPAESTALLQDRKSREKHHNILAKTLANDKHSHKPHLVETSQPSDKTVLDTSYALTGETENDCRSTKYEMYSKNAEKSSGSKRTIKQKQRRKFMAKPAEEQLDVGQTKDENIHMSHITQDKFQRNSDRNMEEREEMGNDCASKIQMPPVGSKKSSTRKDKEESKKKRFSSESKNKLVSEEVTSTVTRSRRISRHPSNWWVVKSEESPVYSNSSIRNELPLHHNSRQKSAKKTNQSSKNIGKKTIPLKRQKTATKDSQRVQKFLNAKGSGGIIGHDEISSCFLSEPLESDEADLAKRKNLDCSRSTGSSKNEDNIMTAQNVPLKPQTSGYTCNTPTESNLDSGEHKTSVLEESGPSRLNNNYLMSGKNNNDVDDEEVPGSSDDSKRTKVIPKNRIHHKLVLPSNTPNVRRTKRTRLKPLEYWRGQQIDYQGRPSGGFVISGILSPGKISSKRKARENIGKVDKKI

SEQ ID NO: 30061 - protein, 45 aa, Homo sapiens
LNPTCRKPHHTWTSQYRSHSAGIYWQATPKTFSAEKCSRCTDLGA

SEQ ID NO: 30062 - protein, 42 aa, Homo sapiens
MMSDNDHTGQLFHHLEGACQRTKATEKRAELRLGEREKFLSA

SEQ ID NO: 30063 - protein, 26 aa, Homo sapiens
LLPGFPPAATLEDLMEMLQEKQALPF

SEQ ID NO: 30064 - protein, 33 aa, Homo sapiens
LHGLLGSTSTLEKVCRCLHFPGSMQADECHSCN

SEQ ID NO: 30065 - protein, 411 aa, Homo sapiens
VGGARAGPGSSRGEPGARRSAARPSSAPLPPFLGALALASPLAFAGGAQKDAQRQRLGERRFKPHVCVLGGQSPPALADPGSRPARAARVLKINLIGHRKRILASLGDRLHDDPPQKPPRSITLREPSGNHTPPQLSPSLSQSTYTTGGSLDVPHIIMQGDARRRRNENYFDDIPRSKLERQMAQTGDWGEPSITLRPPNEATASTPVQYWQHHPEKLIFQSCDYKAFYLGSMLIKELRGTESTQDACAKMRANCQKSTEQMKKVPTIILSVSYKGVKFIDATNKNIIAEHEIRNISCAAQDPEDLSTFAYITKDLKSNHHYCHVFTAFDVNLAYEIILTLGQAFEVAYQLALQARKGGHSSTLPESFENKPSKPIPKPRVSIRKSVDLLHASHTGQEPSERHTEEALRKF

SEQ ID NO: 30066 - protein, 263 aa, Homo sapiens
LTYKMKQDASRNAAYTVDCEDYVHVVEFNPFENGDSGNLIAYGGNNYVVIGTCTFQEEEADVEGIQYKTLRTFHHGVRVDGIAWSPETRLDSLPPVIKFCTSAADMKIRLFTSDLQDKNEYKVLEGHTDFINGLVFDPKEGQEIASVSDDHTCRIWNLEGVQTAHFVLHSPGMSVCWHPEETFKLMVAEKNGTIRFYDLLAQQAILSLESEQVPLMSAHWCLKNTFKVGAVAGNDWLIWDITRSRYFLDMFVYYTPKKGSNCC

SEQ ID NO: 30067 - protein, 577 aa, Homo sapiens
LPITDFISKIQSLGFWTRLHLIHFWNVLLEAGYDVSEAYLLSVAKIKADQCHTMRKSGTLSVLQCRLIELTVLDKCRLMFFIGSFLKFMGKTNEAEELFLSVEDMLVQSQSMTDMLLKVQNAIGELYLETGMTQEGFQYFQKAWSSMLRLSLSDLEDSRDLVKQKVRVLDNLAKSASEEYLKENHILEYATEISNLLDNNPRDQATMKYIEGVLMFVAGNTSLAKMKLRECLNIRKSLFGKKNMLVGEVMEFLADLLFFPQRDSKKSQRKQVLKYYKQVIKIKENAETLAKSSLLRKQLSISLSDTLCKLAGHLLASDSCHHVMIEAVGYLYRSVDLRVIHLGSSHSSIHGIHGILHLLREIEWIRSRRYWPQGMSQQHSEGSRNGFSLWEHLVKLNYHSAQSSNTVSSAMCMNADKLHRARRMDLAPQTISDKSKCAPGKGKKKPIICISAEEKIQRKTQNNAEIWNGSGKEASKKKTDYSSNILSLGKMNGLIKLSRQRILLAKSESGEGEITTIYHHPLPWPVSTKNPGESEFISEKWLFHSPDYISISQKSFLQRRLHIETKLLKTSNDINKE

SEQ ID NO: 30068 - protein, 145 aa, Homo sapiens
LRKKPDLSPLKLTILANELKEYRINHNEFQCMKEYLEAVSVQELWELVLKRWIEDYSWTFQPKRANSDTVASGEGLDSWVADALCLLCLSHGGLAEDELLQLLDMLGYRNHYKVTALHWAAFRNATKQWVQEKPNGLLYFWHQSL

SEQ ID NO: 30069 - protein, 505 aa, Homo sapiens
LTEFEIIQAAFLNESQFQYFYFRTGTTLLKALDDEKKGERLPSSSSTNEEETLRIGKLKAKIISKGLPVRFYSDLHELGELVFKDWSVVIEKLHPATLMIENIDYKHSFERFYHEEFTEKCKQMCVISKESDRTFEILEKFALKDVELDFNNVAADSSLDSVPRINPTPTYKSILLLSREHGCGKSTLIANWVNYFKKKHPSMLLIPHFVGSTCESSYIMSVIHYFITELQYRNYGKRLETDILNEDSDGLVFSFLVEVFIASISLKPCILVLDGIEELIGIYGISGQKVKDFSWLPHSLSPHCKFIMSTVSSSLSYKSLCARPDVRTVELISTGDEETKLNIFRKHLSIPMMDPFEQSTQALRKKPDLSPLKLTILANELKEYRINHNEFQCMKEYLEAVSVQELWELVLKRWIEDYSWTFQPKRANSDTVASGEGSWVADALCLLCLSHGGLAEDELLQLLDMLGYRNHYKVTALHWAAFRNATKQWVQEKPNGLLYFWHQSL

SEQ ID NO: 30070 - protein, 51 aa, Homo sapiens
LGCRYQKKGEKLTEESVTEDDKRRNYGGVYVGLPSEAVNMVSSQTKTVRKN

SEQ ID NO: 30071 - protein, 395 aa, Homo sapiens
LRNHLLESEGSYTSEALASEHREAKLRKKVTVLEEKLVSSSNAMENASHQASVQVESLQEQLNVVSKQRDETALLSASQQQVKQYALSLANLQMVLQHFQKEEKSMYSAELQKQKQLIAEWKKKAESLERKVISLQERLDEADAALDSASRLTEQLDLKEEQIEELKKQNEFQQEMLDDVQKKLVNLANSLEGKVDKVLMRNLFISHFHMPKNQRHEVLRLMGSILGVRREEMEQLFHDNQGSVTRWMTGWLGRGSKSVPNTPLRPNQQSVLNSSFSECFVKFLETESHSSVPPPKLSVHDMKPLESPGRRKLDTNAPESFKDTAESRSGRRREVNSVLAPRSAAVPLINPAGLGPGGPQHLLLKPISDVWPTFTPLPVLPDNSAGVVLKDLGKQ

SEQ ID NO: 30072 - protein, 173 aa, Homo sapiens
LAALAGTACHCGFPTTRFPLHDREDEQLCAQKCSAEEFESCGTPSYFIVYQTQVQDNRCMDRRFLPGKSKQLIALASFPGAGNTWARHLIELATGFYTGSYYFDGSLYNKGEEMAGRAGQEVPWAWEGPHLEGMGILLLEYLLCATQLSQAHFLRLTACLVPPHLPLCPTNIS

SEQ ID NO: 30073 - protein, 360 aa, Homo sapiens
LPSAGRKWGADSGSYRSGPASAPGWRELGVSCLSQSGFGDSCVLRLFMEEMSGESVVSSAVPAAATRTTSFKGTSPSSKYVKLNVGGALYYTTMQTLTKQDTMLKAMFSGRMEVLTDSEGWILIDRCGKHFGTILNYLRDGAVPLPESRREIEELLAEAKYYLVQGLVEECQAALQNKDTYEPFCKVPVITSSKEEQKLIATSNKPAVKLLYNRSNNKYSYTSNSDDNMLKNIELFDKLSLRFNGRVLFIKDVIGDEICCWSFYGQGRKIAEVCCTSIVYATEKKQTKVEFPEARIYEETLNILLYEAQDGRGPDNALLEATGGAAGRSHHLDEDEERERIERVRRIHIKRPDDRAHLHQ

SEQ ID NO: 30074 - protein, 161 aa, Homo sapiens
MEEMSGESVVSSAVPAAATRTTSFKGTSPSSKYVKLNVGGALYYTTMQTLTKQDTMLKAMFSGRMEVLTDSEGWILIDRCGKHFGTILNYLRDGAVPLPESRREIEELLAEAKYYLVQGLVEECQAALQVGITLSSHMGGEAPSLPAFLIFPLCKMGAVSV

SEQ ID NO: 30075 - protein, 99 aa, Homo sapiens
LRDPGERAAHRPAGSPPSPRSALSGLPGAPSSGPGGASDRLKRAGRGLGGRGLPSRRAAEGEGGPPFWRGEGGWVRSPQPALRSSGPREGRLSGGGGAG

SEQ ID NO: 30076 - protein, 115 aa, Homo sapiens
LEKMTFEQRHEESGEYLEKSISGRGKCQGRGPEVLLTAIVCCGGRLPENGAIQEEMGQRNKEKSNPIFSVPLPSLPHPFFLADYSVVLFKIYSVFVFHLRRFSLFVFLLFATSVF

SEQ ID NO: 30077 - protein, 459 aa, Homo sapiens
VDLQITLRNFNHWRQEMLFHRAKHDVAHMIVGHHPGQNMGQAFLSGACSSGFAAAVESFHHEDVLLFAALMAHELGHNLGIQHDHSACFCKDKHFCLMHENITKESGFSSCSSDYFYQFLREHKGACLFNKPRPRGRKRRDSACGNGVVEDTEQCDCGSLCQHHACCDENCILKAKAECSDGPCCHKCKFHRKGYPCCPSSRSCDLPEFCNGTSALCPNNRHKQDGSKCHTIYECLKVHCMDPNNQCLQLYGYGAKSASQECYNSMNSKGDQFGNCGISTSPGSQYVRCSDGNIFCGKLICSGITGLPKINLQHTMIQVPQGDGSCWSMDAYMSTDIPDEGDVHNGTYCAPNKVCLNSACTDKTPVISACNPEKTCNGKGVCNDLGHCHCNEGHAPPDCVTAGSGGSVDSGPPGKLGGTPSGEGENHNMTHSRREEHAVDMMILSFIILFIILLLSTII

SEQ ID NO: 30078 - protein, 24 aa, Homo sapiens
LHFSLGDRARLSLKKKKKDRIFLL

SEQ ID NO: 30079 - protein, 50 aa, Homo sapiens
VLRSIPSLYPVDATSPPLPVTTKSLQTLSNVPLGSQIFLPLAFGSTLFSC

SEQ ID NO: 30080 - protein, 117 aa, Homo sapiens
VLEREPEPEPETKRGGREHEWGGACPRAPAPLVPLVPQPSSGAAVQARRPRVHAAPLPRAFCGHPGLPGHRGEGTRGQGRPLRQEPSEKGAQTGGRREAPLKPGAGSGTQLGVQRAG

SEQ ID NO: 30081 - protein, 67 aa, Homo sapiens [sequence omitted]

SEQ ID NO: 30082 - protein, 27 aa, Homo sapiens
MTALGNEYSEENPTSTKAWRCQDVSSA

SEQ ID NO: 30083 - protein, 23 aa, Homo sapiens
MHIEIREMRKEIEKRDSRELILY

SEQ ID NO: 30084 - protein, 70 aa, Homo sapiens
LVQLWTCDSSQTKGVTCRALPGTILKGALSFCWATDNMCIRDRRACLIIKPIREEQSQEMVGEQMPENII

SEQ ID NO: 30085 - protein, 19 aa, Homo sapiens
MQGFAWNYSERGTLFLLGY

SEQ ID NO: 30086 - protein, 27 aa, Homo sapiens
VKVSSLDNQMHSDWFNSGPVTQARPRE

SEQ ID NO: 30087 - protein, 67 aa, Homo sapiens
LTSHLSNACLFSPHPPLSMCSWRTPRTQGLCTHHESSSAFEVESEERKESGENSQYFGKLIIPSPFV

SEQ ID NO: 30088 - protein, 36 aa, Homo sapiens
MNVLLLALPLTHRVPQASPFTSSVSVSPFILLRQWT

SEQ ID NO: 30089 - protein, 85 aa, Homo sapiens
MKERGRERKEEKEGEWKDVWIWMYGFHSFYPGKSLLILQCPSKMASLLGHHLQSLLQAGSYIPQNNHPSDHASVWGNEDQPRNLR

SEQ ID NO: 30090 - protein, 24 aa, Homo sapiens
LLNSCRPEIGAFQAPQMSHKPPRL

SEQ ID NO: 30091 - protein, 22 aa, Homo sapiens
LPSLKAASHSPKDTSPPPFEVH

SEQ ID NO: 30092 - protein, 54 aa, Homo sapiens [sequence omitted]

SEQ ID NO: 30093 - protein, 82 aa, Homo sapiens
MFSFLKIHLFQWGAWKMAFPESILISIDHSQSLKSNPHTTENCLLHLSPFPVEKRRKSTRMRLSKWQPRSCLSSLAWLGLEL

SEQ ID NO: 30094 - protein, 281 aa, Homo sapiens
LQSPFCMPGAELMALPGSYPPSEMGTLTFMAEGTSPQRRSVLPRVPEKQRGSASEPWPGSTAARLCQPLQLCFLLPGNGIDVTLGRGCCCFWKTWRHRALCPWAIFSARPSSESWCSPQIKESEGVVNDELPNCWECPKCNHAGKTGKQKRGPGFKYASNLPGSLLKEQKMNRDNKEGQEPAKRRSECEEAPRRRSDEHSKKVPPDGLLRRKSDDVHLRKKRKYEKPQELSGRKRASSLQTSPGSSSHLSPRPPLGSSLSPWWRSSLTYFQQQVLPRRTPS

SEQ ID NO: 30095 - protein, 263 aa, Homo sapiens
LLSLGFCKLVRNKSLTLESFGARALKSFWCFLSRLHPSITVLVTGAKWLSVLEEKAMKPVETHSLQMLHTILSTGSPLKAQSYEYVYRCIKSSILLGSISGGTDIISCFMGHNFSLPVYKGEIQARNLGMAVEAWNEEGKAVWGESGELVCTKPIPCQPTHFWNDENGNKYRKAYFSKFPGIWAHGDYCRINPKTGGIVMLGRSDGTLNPNGVRFGSSEIYNIVYAQRQESGSCRQTDHRWKSRGARRCFLEPRDPGSVPGHP

SEQ ID NO: 30096 - protein, 172 aa, Homo sapiens
VCGRGPSLYLCICLEYCIISNSLRKRERQPGCVAVVCVGLIFNSPIPGKAVWGESGELVCTKPIPCQPTHFWNDENGNKYRKAYFSKFPGIWAHGDYCRINPKTGGIVMLGRSDGTLNPNGVRFGSSEIYNIVYAQRQESGSCRQTDHRWKSRGARRCFLEPRDPGSVPGHP

SEQ ID NO: 30097 - protein, 90 aa, Homo sapiens
LSLYGTSLSHTDVSHLCETLKHTTCKIEELMLGTCDISDEGCEDIASVLACNSKLIHLSLVENPEKDKRMMLLCPGDADVDVLLSHLCLL

SEQ ID NO: 30098 - protein, 195 aa, Homo sapiens
VLQFLQSGPVANGEGVGFSPGPPPGSQEVLVSTSRAPKLQGAHGPIWWVRTCRGPGGSHPHLSGLCLHHPRGHALKGCLQGLQARGTPQGGQRLLPASPQSPAASRLAVDLHVVGHTSHYKATPGPIPAPSTAPTCGQVLPPPQDLVSRQPHSSLLESKARHSPKREGVFGGALTVSRPQGSWAGSNQWSSREQR

SEQ ID NO: 30099 - protein, 32 aa, Homo sapiens
VLLRSSTLTQPHNKKFVYDQASCKWNSTNQEG

SEQ ID NO: 30100 - protein, 185 aa, Homo sapiens
LRAQHEENIKKLVDQFLQEQKEEALKIQSNDGKELGINDQVVPKNIPKVAENVADKNEEPSSNHILHGKEQIKRGGDAGMPGIKKNDLAKVDDLPPALKKPPISVFQHESHQAISHLPTGQPLSPNMPPDSQVNHNGNPGTSKQKPSSPLQCLIPSSNLDSEPRIQTDILKQATKDRISEFHKLK

SEQ ID NO: 30101 - protein, 8 aa, Homo sapiens
MERHFATR

SEQ ID NO: 30102 - protein, 62 aa, Homo sapiens
MNHTPHLIPELQLQDNAARGLVLRAHVSISGVQYFYSVFDQRHLNIPGENSDVDLIKFNGHI

SEQ ID NO: 30103 - protein, 11 aa, Homo sapiens
MLPEAWSSELT

SEQ ID NO: 30104 - protein, 112 aa, Homo sapiens
LEKTVMWILSNLMGTSEEGNLLSTVSPTVKALFGKTRVSPIFPFSPRSPFQPLIPRTPGSPWGPVGPASPLGPGFPIGPMGPGKPVGPKGPMLPLGPSGPVGPTSPLFPFCP

SEQ ID NO: 30105 - protein, 12 aa, Homo sapiens
LLGKMMTSTPDV

SEQ ID NO: 30106 - protein, 61 aa, Homo sapiens
MMLCGALGNCVCITSYFWPQVIQTSALCPGGEPLGTCAHKHQFWLLPYPSFAIPNYAINKF

SEQ ID NO: 30107 - protein, 152 aa, Homo sapiens
LVSERLSAQPALTCLRCVTQYHLLKTELRQCGVKGRGWTSESGLGSNTGHTAYQPCDPGEKMAIPPNVWPPPAKAKTFVGFFLYCLNKEEFVHSLSGSGFHPMAMWELQDLISGLTCASILPHSIWLKLLLHFLLGCDHSGSPTVHQSQHLK

SEQ ID NO: 30108 - protein, 68 aa, Homo sapiens
MQRTGPQAPVATRIPSELLWNMSLSSQSVKCVCDSAFLRTQVTWRLENSMEQGKQRRCAGVYVAFIIM

SEQ ID NO: 30109 - protein, 80 aa, Homo sapiens
LSGTQRRRGSRKGLGGGAGGGKTCRIPSELLWNMSLSSQSVKCVCDSAFLRTQVTWRLENSMEQGKQRRCAGVYVAFIIM

SEQ ID NO: 30110 - protein, 38 aa, Homo sapiens
MGPDFLHPRLACSFRSLLHHSRETFCAIRYSSTPSYAA

SEQ ID NO: 30111 - protein, 24 aa, Homo sapiens
MGEVRGVDTGNPAMRWRSLNVESE

SEQ ID NO: 30112 - protein, 10 aa, Homo sapiens
LRHRMTRSLK

SEQ ID NO: 30113 - protein, 38 aa, Homo sapiens
MTVPRWFLPRCRTGAQTAFASPPNPRRSLLTWATPHPR

SEQ ID NO: 30114 - protein, 22 aa, Homo sapiens
MELTFSEIQLLIVTLKLSSSLD

SEQ ID NO: 30115 - protein, 10 aa, Homo sapiens
MLRNSADKKF

SEQ ID NO: 30116 - protein, 32 aa, Homo sapiens
LKLNVYNLYFGFMYKSWNLCKNMSSTDSPLIL

SEQ ID NO: 30117 - protein, 17 aa, Homo sapiens
MSFFFLSLYEMKNILAK

SEQ ID NO: 30118 - protein, 29 aa, Homo sapiens
LYLLMEKVLFKVLFLIEYYQKGKKNDLNF

SEQ ID NO: 30119 - protein, 56 aa, Homo sapiens
LMKMSFERCTARNKMFVNSPFTKVDNYCTFLMEKVLFKVLFLIEYYQKGKKNDLNF

SEQ ID NO: 30120 - protein, 31 aa, Homo sapiens
MSHLKFDICNSILFKRFNNDRMKTTIKETST

SEQ ID NO: 30121 - protein, 63 aa, Homo sapiens
LEQRAVGGASPRLAQSVLTCSREPILENSLTSLIEYLHNALEHDMRLRFNNDRMKTTIKETST

SEQ ID NO: 30122 - protein, 13 aa, Homo sapiens
VMPDLINLAGETG

SEQ ID NO: 30123 - protein, 15 aa, Homo sapiens
MRTPEVQIKKSAPKS

SEQ ID NO: 30124 - protein, 28 aa, Homo sapiens
VPFRASPELRSLRGLESSPRTGVFLLRR

SEQ ID NO: 30125 - protein, 42 aa, Homo sapiens
LLKLHKKSSRGVPWSPAMGRGALRRGRGRARRRGPRRGGTPG

SEQ ID NO: 30126 - protein, 29 aa, Homo sapiens
LNWRKGTGTRVEAGRMVELTLGQNTENRI

SEQ ID NO: 30127 - protein, 98 aa, Homo sapiens
LPCAESQRNTFQFFSIDYDSSGLFTVGFTVLRRRSDGREDRKKEPTMKQKLRLTLSSPFLSWTCPKLEAGGGWSAGMLQKSHGRAPGVHHMCTLLHDQ

SEQ ID NO: 30128 - protein, 55 aa, Homo sapiens
MKQKLRLTLSSPFLSWTCPKLEAGGGWSAGMLQKSHGRAPGVHHMCTLLHDQMEI

SEQ ID NO: 30129 - protein, 58 aa, Homo sapiens
MGGRLVFTTCVHCCTTRLALCMWETIREWWGMLKRHHWNPTVPQTRAFPSLPLPQMEI

SEQ ID NO: 30130 - protein, 55 aa, Homo sapiens
MFFFNCITNHYSIIKQVVASSSPHHHDPHQVLYIRLCKDLSLKNRDFLPGYYILI

SEQ ID NO: 30131 - protein, 131 aa, Homo sapiens [sequence omitted]

SEQ ID NO: 30132 - protein, 46 aa, Homo sapiens
LASDGNGMHAAVENIPELKKCNYVLCVLNAQKNPDPVGKRDEMWRE

SEQ ID NO: 30133 - protein, 136 aa, Homo sapiens [sequence omitted]

SEQ ID NO: 30134 - protein, 49 aa, Homo sapiens
LPPKSARLLRSPSAVGGHLAVTVGSWVIVHVVGIRKACILSMNVSRTFL

SEQ ID NO: 30135 - protein, 119 aa, Homo sapiens
LRARSEQWDPGKCPFFKKPFFFHFKKYDIFFFSLDPKGDRRVQITGNAPFGQCSVESPCVRGLDLCVLAACLRQGFRARSVGVGNLCRMSEGLCRKPGSGRRDLCLGAEWLLGAGRQFS

SEQ ID NO: 30136 - protein, 143 aa, Homo sapiens [sequence omitted]

SEQ ID NO: 30137 - protein, 23 aa, Homo sapiens
MVFAKWKPEEEENVLPRGCEDFL

SEQ ID NO: 30138 - protein, 63 aa, Homo sapiens
LIKPPPFLKAFKKKQKKSQNIDPGESFKFAGQCNVRPGQDHTSIFLSPSVFIGNAMEVGVGRC

SEQ ID NO: 30139 - protein, 18 aa, Homo sapiens
LGHAGSVRSEPLQARLPT

SEQ ID NO: 30140 - protein, 146 aa, Homo sapiens
VRPRVRRARGPSVLAAVARAEPAQGRRCCRRVKENGPSPQFAGPRCGTSRSPHSRGAGGPFPAQAALCTGSGLGEWRVRSAPGSLRPVWRWQTLVSSRLPRPAWRAAALVVALESSPGGRRRRARVGEPLQLRRKRVKPGEGETHP

SEQ ID NO: 30141 - protein, 28 aa, Homo sapiens
LYLQNSQETRTLKARDDTEHAFIAAYHL

SEQ ID NO: 30142 - protein, 91 aa, Homo sapiens
LFSVKQSRDPVQYLDCHRPVSGVHNGKIISRGVLLSVCVTSMKTRVSLISTICGMFRDERLVSLLAAEHYEIMVRSPRHLSLFLYPPATVV

SEQ ID NO: 30143 - protein, 93 aa, Homo sapiens
VQYLDCHRPVSGVHNGKIISRGVLLSVCVTSMKTRVSLISTICGMFRDERLVSLLAAEHYEIMAWGSVSRTAQGTRFPVALAPTRETSACSRW

SEQ ID NO: 30144 - protein, 67 aa, Homo sapiens
VQYLDCHRPVSGVHNGKIISRGVLLSVCVTSMKTRVSLISTICGMFRDERLVSLLAAEHYEIMRPAP

SEQ ID NO: 30145 - protein, 27 aa, Homo sapiens
MKSEYLLEMSYANLDANNIRKKRFFHN

SEQ ID NO: 30146 - protein, 20 aa, Homo sapiens
LLEMPQPGGLISSNLGDRDL

SEQ ID NO: 30147 - protein, 82 aa, Homo sapiens
LVDAAGPSMHTSRLRVTLDEPPLPAGSMLQLSHAVDENEGYDHCVGGVCVAIAGITCGIVERLSVGKKTHSEVTPIYVKLSP

SEQ ID NO: 30148 - protein, 80 aa, Homo sapiens
LVDAAGPSMHTSRLRVTLDEPPLPAGSMLQLSHAVDENEGYDHCVGGVCVAIAGITNAEDKASKQKNFQKNHRVLDLEKN

SEQ ID NO: 30149 - protein, 11 aa, Homo sapiens
VAHEGRVLKTR

SEQ ID NO: 30150 - protein, 29 aa, Homo sapiens
MSCVHRPQQGIAWTAGGQIRTTRPEMTFH

SEQ ID NO: 30151 - protein, 19 aa, Homo sapiens
LQLLLQKSQFSCGIKMVQK

SEQ ID NO: 30152 - protein, 42 aa, Homo sapiens
LFLSGKTSLKAAVSSDPRPCISATPHHAPPVLPACGFQGSRN

SEQ ID NO: 30153 - protein, 27 aa, Homo sapiens
LGRLWAPPLQTLVGDQCSCSCSNARVA

SEQ ID NO: 30154 - protein, 194 aa, Homo sapiens
LSFRQHLPSAVCVRKPILSCLPGPRAAAVREPAFVAHGATTQSGARLLSGPGYWHFPGAHGASAPIFPMRPQPRGGSGRKENTGREAEEHVMETDRVEGARDGDKRKEVCFVPIQGSFCFMRLTCARLVAALDIHGLSFSLRFCGSRDTKHEDITGREGQVTPLPRGTPQLCTARVGLSSPRTRGQGVPISCKT

SEQ ID NO: 30155 - protein, 42 aa, Homo sapiens
LLCGNQLLWPMEQRLSLGLGYSPARGTGISLGPMGRVPLFFP

SEQ ID NO: 30156 - protein, 51 aa, Homo sapiens
VSSHQHLTLTFRRHGVPESLQPARAESHPLAVLLEFRSSCLSGNICQARFV

SEQ ID NO: 30157 - protein, 171 aa, Homo sapiens
LFSAHILSPWGAEVKAEPVEVVAPRGKSGAVLSKKSKGQVKEEGINKSEKRMKLTLKGGAAVDPDSGLEHSAHVLEKGGKVFSATLSLVDVVKGTNSYYKLKLLKDDKESRHWIFKSWDRVGTVIGSNKLEQMLSKEDTTEHFMKLYEEKLGMLGTPKIHKVSQKVLPPGD

SEQ ID NO: 30158 - protein, 27 aa, Homo sapiens
LWVWTELASRSVSKMLFSAGHYKRFLL

SEQ ID NO: 30159 - protein, 82 aa, Homo sapiens
LGHRLWGPDLPGETHGSKEPRNPSTKWPLWQDGRVRSGEAGCVRGKGKKWKQRLFRGTWERSLHSSQASSLRPLCRLGPGTA

SEQ ID NO: 30160 - protein, 338 aa, Homo sapiens
VDSDLTNHAYMIASIKSQKDRVQRASGWPEKRHKLGEPKTPAWRAAPAAGPALGNSVRRSAVCVSSAPIPSHLNEGFGRDTASRRNAPAHPSRNPHHLPPTPDQSSRRPGVSHQRAERAFELLLHHDQDALGHLVHVCVHQSCSESPQGLFHDAHPGVTLTLGQEEKACPEDSASSSSSLPAPSVLGAHTGVGPQAGGHVPGWQDLSTVKLDAPAGPVLPARIPLPQDALHTLRIPSRCSGACTEGLGPAPGNSKEANGFMSRFCQIASEAALFAVAAECRAGHLSGQSGAPLPCISWAMRGDLCPLHRSCVPCACDRVFPVYSVLLHVFQFRFVVCE

SEQ ID NO: 30161 - protein, 192 aa, Homo sapiens
MPAVLGFEGSANKIGVGVVRDGKVLANPRRTYVTPPGTGFLPGDTARHHRAVILDLLQEALTESGLTSQDIDCIAYTKGPGMGAPLVSVAVVARTVAQLWNKPLVGVNHCIGHIEMGRLITGATSPTVLYVSGGNTQVPVILATPEAGQENHLNPGGGSCGEPRSHHCIPAWATRAKLRLKQTNKQKTKKNN

SEQ ID NO: 30162 - protein, 353 aa, Homo sapiens
LDIWMYFLCLLTFINCAYVKWGTLVQDIFTYAKVLALIAVIVAGIVRLGQGASTHFENSFEGSSFAVGDIALALYSALFSYSGWDTLNYVTEEIKNPERNLPLSIGISMPIVTIIYILTNVAYYTVLDMRDILASDAVAVTFADQIFGIFNWIIPLSVALSCFGGLNASIVAASRLFFVGSREGHLPDAICMIHVERFTPVPSLLFNGIMALIYLCVEDIFQLINYYSFSYWFFVGLSIVGQLYLRWKEPDRPRPLKLSVFFPIVFCLCTIFLVAVPLYSDTINSLIGIAIALSGLPFYFLIIRVPEHKRPLYLRRIVGSATRYLQVLCMSVAAEMDLEDGGEMPKQRDPKSN

SEQ ID NO: 30163 - protein, 31 aa, Homo sapiens
VEGPSIVSVLFFKLWHIDLYVLPVINELLQR

SEQ ID NO: 30164 - protein, 701 aa, Homo sapiens
LHRVSQFYREWRSSWRRWGPELRHTLWPRPSGLCFRGGKGSHVIPPLRSPAGQWLVGAKMAAAAAATAAAAASIRERQTVALKRMLNFNVPHIKNSTGEPVWKVLIYDRFGQDIISPLLSVKELRDMGITLHLLLHSDRDPIPDVPAVYFVMPTEENIDRMCQDLRNQLYESYYLNFISAISRSKLEDIANAALAASAVTQVAKVFDQYLNFITLEDDMFVLCNQNKELVSYRAINRPDITDTEMETVMDTIVDSLFCFFVTLGAVPIIRCSRGTAAEMVAVKLDKKLRENLRDARNSLFTGDTLGAGQFSFQRPLLVLVDRNIDLATPLHHTWTYQALVHDVLDFHLNRVNLEESSGVENSPAGARPKRKNKKSYDLTPVDKFWQKHKGSPFPEVAESVQQELESYRAQEDEVKRLKSIMGLEGEDEGAISMLSDNTAKLTSAVSSLPELLEKKRLIDLHTNVATAVLEHIKARKLDVYFEYEEKIMSKTTLDKSLLDIISDPDAGTPEDKMRLFLIYYISTQQAPSEADLEQYKKALTDAGCNLNPLQYIKQWKAFTKMASAPASYGSTTTKPMGLLSRVMNTGSQFVMEGVKNLVLKQQNLPVTRILDNLMEMKSNPETDDYRYFDPKMLRGNDSSVPRNKNPFQEAIVFVVGGGNYIEYQNLVDYIKGKQGKHILYGCSELFNATQFIKQLSQLGQK

SEQ ID NO: 30165 - protein, 98 aa, Homo sapiens
LLELRPKIYSELIGQMLQKIICVIKSLLGQNTSLNKEDVRPKWVHHKALIDLIFSKIFELNLHDKELARQRRGIRIFQIGGADASHIQKNPCNHSSRC

SEQ ID NO: 30166 - protein, 142 aa, Homo sapiens [sequence omitted]

SEQ ID NO: 30167 - protein, 143 aa, Homo sapiens
LHSEMSFHYGFTSPDNRGSLSTDKDTAYGSFQNGHGIKREDSRGSLIPEGATGFPDQGNAGENTRQSSTRSSVSQYNRLDQCEIRSLLMCYLYIVKVISEDTLLTYWNEVSPQELIHIFILLEVCLFHFRYMGKRNIARVHNA

SEQ ID NO: 30168 - protein, 50 aa, Homo sapiens
LASRKPRAKRMATSDHSTSPAWCTFLGSLSRLPSIAFIFLLPIKPVLFSF

SEQ ID NO: 30169 - protein, 32 aa, Homo sapiens
MVPQSLHVASKKGKYPLSLDEMSAPHHTWPGC

SEQ ID NO: 30170 - protein, 74 aa, Homo sapiens
LPSKGCGESDRVGAALSSSQRHCPTIPSSLTGTNDSRGPLPSELYRPVWAPVFTSMFPLPRGPRLTCPRALSSC

SEQ ID NO: 30171 - protein, 9 aa, Homo sapiens
LTGLRNMCF

SEQ ID NO: 30172 - protein, 54 aa, Homo sapiens
VRASWEFHKFYRSRGVLFEQGADNTYNPLRISKHSRMQKYSYFTTESPGELLTF

SEQ ID NO: 30173 - protein, 27 aa, Homo sapiens
LSMFLQSLMKRDIKGTRGALQRDEAPG

SEQ ID NO: 30174 - protein, 37 aa, Homo sapiens
LSPVSPPTESSKPGGKLFFPLWGLREIGGKDSWEEKS

SEQ ID NO: 30175 - protein, 10 aa, Homo sapiens
MTVLLLHLLP

SEQ ID NO: 30176 - protein, 64 aa, Homo sapiens
LSPGLPGGGAAELAVARMFGAAARSADLVLLEKNLQAAHGFIAPVTKGRTAAKKWNLKTLAIVR

SEQ ID NO: 30177 - protein, 58 aa, Homo sapiens
LSPGLPGGGAAELAVARMFGAAARSADLVLLEKNLQAAHGCRYSTSMPWTLLWEDPII

SEQ ID NO: 30178 - protein, 35 aa, Homo sapiens
MFGAAARSADLVLLEKNLQAAHGMPWTLLWEDPII

SEQ ID NO: 30179 - protein, 12 aa, Homo sapiens
VLLEKNLQAAHG

SEQ ID NO: 30180 - protein, 17 aa, Homo sapiens
VLLEKNLQAAHGIRRRK

SEQ ID NO: 30181 - protein, 530 aa, Homo sapiens
LMKDKAKHLDKCLKMLDMSFKDAERGDDTSCENLLDAFSIKLSETHGYGVQEEFTEENKLLEACIFKNNELLKNIQDVQSQISKIGLKDPTVPAVKHRKKSLIRLDKVLDEYEEEKRHLQEMANSLPHFKDGREKTVNQQCQNTVVLWENTKALVTECLEQCGRVLELLKQYQNFKSILTTLIQKEESVISLQASYMGKENLKKRIAEIEIVKEEFNEHLEVVDKINQVCKNLQFYLNKMKTFEEPPFEKEANIIVDRWLDINEKTEDYYENLGRALALWDKLFNLKNVIDEWTEKALQKMELHQLTEEDRERLKEELQVHEQKTSEFSRRVAEIQFLLQSSEIPLELQVMESSILNKMEHVQKCLTGESNCHALSGSTAELREDLDQAKTQIGMTESLLKALSPSDSLEIFTKLEEIQQQILQQKHSMILLENQIGCLTPELSELKKQYESVSDLFNTKKSVLQDHFSKLLNDQCKNFNDWFSNIKVNLKECFESSETKKSVEQKLQKLSVRDICVFLIKIFNTKILEA

SEQ ID NO: 30182 - protein, 47 aa, Homo sapiens [sequence omitted]

SEQ ID NO: 30183 - protein, 163 aa, Homo sapiens
LGSQEAAWQQRWSARAGRPSLGSSPLPQGPALLPWPSGAPVVLDSHQPWAFGGFNPRVFGGVSPFSVLFSKPLPLAALYPRRSPHLPHPSSLASTGAAGDEALRHPQPSPPCSPSLHCSGWPDAWGVPELHLPTPGLVGCGSAPFSVAQLRTNDALQCTGRLG

SEQ ID NO: 30184 - protein, 76 aa, Homo sapiens [sequence omitted]

SEQ ID NO: 30185 - protein, 55 aa, Homo sapiens
MMCNQHLCLVPNIFITPKARPITIMQVFLFPPPPSSWKPTNLLCCYGFTYSGYFI

SEQ ID NO: 30186 - protein, 155 aa, Homo sapiens
LGLGRNPVSRQRTALRGYRAFPPRRRNSSSSPSGSGDRSTAGPPGIPCRSPRAHLAGCCDQNYLRVAGSSLLLTDTPTSPSKLEGTTPSDLETSEAGQETLSSFPRAGSLIRGWQKSSCASHPLPSSRVSERITSIPPTSQDGCAHSFIQSTIFY

SEQ ID NO: 30187 - protein, 20 aa, Homo sapiens
LSLPHLLPAHIYHRPLWHGM

SEQ ID NO: 30188 - protein, 105 aa, Homo sapiens
MLYKASIFFFFLKTGYEDKVPELYLILSGIKGKSITFANCPLHQLTSWVTTGRKSRSCSSWPINCIGPFGYAERRRKGGNQPSPVCPLGPSSHLSLDHISPWTLG

SEQ ID NO: 30189 - protein, 26 aa, Homo sapiens
MRKLINTKSFHVFSDERLAESKKRSP

SEQ ID NO: 30190 - protein, 53 aa, Homo sapiens [sequence omitted]

SEQ ID NO: 30191 - protein, 62 aa, Homo sapiens
LPEKPYPFWFSLLRPQLLALIILVREQLVILVGLVFGLRIFYCGLNYNHCTVMIQCCIMILL

SEQ ID NO: 30192 - protein, 111 aa, Homo sapiens
MGSHYIAQAGLKLLSSSDPPALASHGAETTGVSHHSQPDLYFIKRQRWSTQLSNLLHFWTLSIRKLREGENSEESSELRPLIFCPESPANTLYNPKGLTNISEQRQHFCTG

SEQ ID NO: 30193 - protein, 76 aa, Homo sapiens [sequence omitted]

SEQ ID NO: 30194 - protein, 26 aa, Homo sapiens
LDPTNIQSSHSLTPRTRMAKDEEDRN

SEQ ID NO: 30195 - protein, 28 aa, Homo sapiens
LCSPASKLECFPPQGGVSLCRLTLSSPL

SEQ ID NO: 30196 - protein, 65 aa, Homo sapiens [sequence omitted]

SEQ ID NO: 30197 - protein, 29 aa, Homo sapiens
LLSSFLTSNFLFNPLLPDSLYSVEARSQR

SEQ ID NO: 30198 - protein, 29 aa, Homo sapiens
LSSFLTSNFLFNPLLPDSLYSVEARSQSS

SEQ ID NO: 30199 - protein, 96 aa, Homo sapiens
LSSFLTSNFLFNPLLPDSLYSVEARSQRFPVPPTSPCWCLHLLPSILQCLLLWAWPQGYGQTPVPSQRPLVIVPCSHPTPPKSKLQARGPWPGWVG

SEQ ID NO: 30200 - protein, 44 aa, Homo sapiens
LWAWPQGYGQTPVPSQRPLVIVPCHPTPPKSKLQARGPWPGWVG

SEQ ID NO: 30201 - protein, 86 aa, Homo sapiens
VMAFSFLRVCPAPHSNVGCCFSPAGCSWQGRCALGFAVPVAAVRGRSVCPEGFLQTFILHSHGDTLHLFPRDRLDPETLDPGPPLE

SEQ ID NO: 30202 - protein, 54 aa, Homo sapiens
LDKPPTRSRLRSGRSLHITRVCHHPLCFSVLCDTNAQGPQGTIIINQFVLSLTT

SEQ ID NO: 30203 - protein, 13 aa, Homo sapiens
LQLDFPGRQWSGF

SEQ ID NO: 30204 - protein, 179 aa, Homo sapiens
LSGWAGRAAGEKGLEAGLGLPRVWGAGRGCTGCSPEGGRREGAQRCWEQMEREVAAARVPGGPGLGLIFVEQLPGPCVSGRGRHGGLELQAVAGRQVPVLGVWSLSSSCELSVGSTYGRCPGPVVWWSPGLPGTAGQPGLEEPEGPGQGGPGATASTFDQLCCGDLGMRPLHPGGEPRE

SEQ ID NO: 30205 - protein, 29 aa, Homo sapiens
LRLSCAASGFSFSSYGMSWVRQAPGKGLD

SEQ ID NO: 30206 - protein, 243 aa, Homo sapiens
LEDKPPAPPVRMSRTIFSTGGKDPLSANHSLKPLPSVPEEKKPRHKIISIFSGTEKGSKKKEKERPEISPPSDFEHTIHVGFDAVTGEFTGMPEHWARLLQTSNITKLEQKKNPQAVLDVYDSNTVKQKYLSFTPPEKDGFPSGTPALNAEGTEAPAVVTEEEDDDEETAPPIIAPPPDHMKSIYTRSVIDPVPAPVGDSNVDGGAKSLDKQKKKTKMTDEEIMEKLRTIVSIGDPKKKIYKI

SEQ ID NO: 30207 - protein, 21 aa, Homo sapiens
LRGDVIYIFSRMLKLHFQRLI

SEQ ID NO: 30208 - protein, 40 aa, Homo sapiens
LNIARSYSLVVILVDKFCMCYVFVYTYVHINDVGVDTVIT

SEQ ID NO: 30209 - protein, 23 aa, Homo sapiens
MGGRKHFIISWKYRHISLKIIHF

SEQ ID NO: 30210 - protein, 44 aa, Homo sapiens
MIVMTEKGKLCHYLYHHFHQNLKMLFMTYGDILHVCFSGHSLQM

SEQ ID NO: 30211 - protein, 11 aa, Homo sapiens
LQVVTMWIIGS

SEQ ID NO: 30212 - protein, 28 aa, Homo sapiens
LYCKEEFVYHGLSEQSRNVFYELKILKE

SEQ ID NO: 30213 - protein, 38 aa, Homo sapiens
LPNLFYLFIYLFGKTKSLSVTQAGVHWPSQSSLQLFTL

SEQ ID NO: 30214 - protein, 40 aa, Homo sapiens
VILHPQPPKYLGIQLSWEASRLLARKMVDSSDQWRPCRVL

SEQ ID NO: 30215 - protein, 105 aa, Homo sapiens
LLSRKMVDASEKQALRVPGFGVAWHPRCTPCWRVAQDGAVALRGPPPAGMTDGQFFRAVESPWSRGVGVASHPQCTLCWWMAQDRAVAVGGLPSAERKMVDASEQ

SEQ ID NO: 30216 - protein, 44 aa, Homo sapiens
VESPWSRGVGVASHPQCTLCWWMAQDTVVMRGLPLAGKEDGQFF

SEQ ID NO: 30217 - protein, 40 aa, Homo sapiens
VILGDGRKPWTYMVWGLLQRLLGSSWMWCGHGRKASGDNG

SEQ ID NO: 30218 - protein, 49 aa, Homo sapiens
LSWEIPGDGGEPLGTCSICGVGFFRCWWIPQDAFQGFSMSSVKESENGA

SEQ ID NO: 30219 - protein, 37 aa, Homo sapiens
LLKSLKMERRRHASISRMVVFSREAEVNHWRSPASHR

SEQ ID NO: 30220 - protein, 50 aa, Homo sapiens
LNGSDFGIAWNSHCHPKEMLILSLLPVSFPGGRTKGRTPKIGMNQELGFI

SEQ ID NO: 30221 - protein, 51 aa, Homo sapiens
LPPLDHFIMGQLDAIYLTRPWNPTPLMEPVSTSQSQCDPRELLPACFKPTT

SEQ ID NO: 30222 - protein, 18 aa, Homo sapiens
MHCLDHPLKVMATKRWIC

SEQ ID NO: 30223 - protein, 34 aa, Homo sapiens
LGLSMCTLYIYILKIIARLPSKMWLTTLSSNGNE

SEQ ID NO: 30224 - protein, 1424 aa, Homo sapiens
VTLVRIADLENHNNDGGFWTVIDGKVYDIKDFQTQSLTENSILAQFAGEDPVVALEAALQFEDTRESMHAFCVGQYLEPDQEIVTIPDLGSLSSPLIDTERNLGLLLGLHASYLAMSTPLSPVEIECAKWLQSSIFSGGLQTSQIHYSYNEEKDEDHCSSPGGTPASKSRLCSHRRALGDHSQAFLQAIADNNIQDHNVKDFLCQIERYCRQCHLTTPIMFPPEHPVEEVGRLLLCCLLKHEDLGHVALSLVHAGALGIEQVKHRTLPKSVVDVCRVVYQAKCSLIKTHQEQDRSYKEVCAPVIERLRFLFNELRPAVCNDLSIMSKFKLLSSLPHWRRIAQKIIREPRKKRVPKKPESTDDEEKIGNEESDLEEACILPHSPINVDKRPIAIKSPKDKWQPLLSTVTGVHKYKWLKQNVQGLYPQSPLLSTIAEFALKEEPVDVEKRKCLLKQLERAEVRLEGIDTILKLYLVSKNFLLPSVPYAMFCGWQRLIPEGIDIGEPLTDCLKDVDLIPPFNRMLLEVTFGKLYAWAVQNIRNVLVDASAKFKELGIQPVPLQTITNENPSGPSLGTIPQAHFLLVMLSMLTLQHSANNLDLLLNSGTLALAQTALRLIGPSCDNVEEDMNASAQGASATVLEETRKETAPVQLPVSGPELAAMMKIGTRVMRGVDWKWGDQDGPPPGLGRVIGELGEDGWIRVQWDTGSTNSYRMGKEGKYDLKLAELPAPAQPSAEDSDTEDDSEAEQTERNIHPTAMMFTSTINLLQTLCLSAGVHAEIMQSEATKTLCGLLQMLVESGMTDKTSSPNRLVYREQHRSWCTLGFVQSIALTLQVCGALSSLQWITLLMKVVEGHAPFTATSLQRQILAVHLLQAVLPSWDKTERARDMKCLVEKLFDFLGSLLTMCSSDVPLLRESMLRWRRVCPQASLTATHSSTLVEEVVALLHTLHSLTQWNGLINKYINSQLRSITHSFAGRPSEGAQLEDYFPDSENPEVGGLMAVLAVVGGIDGRLRLGGQVVHDDFGEVTMTRITLKGKITVQFSDMRTCRVCPLNQLKPLPAVAFNVNNLPFTEPMLSVWAQLVNLAGSKLEKHKIKKSTKQAFAGQVDLDLLRCQQLKLYILKAGRALFSHQDKLRQILSQPAVQETGSVHTDDGAVVSPDLGDMSPEGPQPPMILLQQLLASATQPSPVKAIFDKQELEAAALAVCQCLAVESTHPSSPGFEDCSSSEATTPVAVQHIRPARVKRRKQSPVPALPIVVQLMEMGFSRRNIEFALKSLTGASGNASGLPGVEALVGWLLDHSDIQVTELSDADTVSDEYSDEEVVEDVDDAAYSMSTGAVVTESQTYKNRAGFLGNDDYAVYVRENIQVGMMVRCCRTYEEVCEGDVMLAKSSSWTEMDCMISMCSVTGSRKGASTGLGTFMWNL

SEQ ID NO: 30225 - protein, 290 aa, Homo sapiens
LKLQATLNVHDGCVNTICWNDTGEYILSGSDDTKLVISNPYSRKVLTTIRSGHQANISNAKFLPCTNDKQIVSCSGDGVIFYTNVEQDAETNRQCQFTCHNGTTYEIMTVPNDPYTFLSCGEDRTGRWFDTRIKTSCTKEDCEDDILISCRRAATSVAICPPIPYYLAVGCSYSSVQIYDRRMLGTRATGNYAGRGTTGMVAHFIASHLNNKSCRVTFLCYSEDGQEILISYSSDYIYLFDPKDDTARELKTPSAEERREELRQPPVKRLSLRGDWSDTGPRSRPESERE

SEQ ID NO: 30226 - protein, 227 aa, Homo sapiens
VESRVVPPGPYRATKLWNEVTTSFRAGMPLRKHRQHFKKYGNCFTAGEAGDWLYDLLRNNSNFGPEVTRQQLLRKFLKNRIIEDIKGRWGSENVDDNNQLFRFPATLPLKTLPRRHPELRKNSIENFSKDKDSIFKLQNLSRRTAEKHGLHLSQENAEKIKHEIINEDQENAVDDRELSQEDVEEVWRYFILIYLQTILGVPSLEEVINPKQVIPQYIMGPIQVNME

SEQ ID NO: 30227 - protein, 20 aa, Homo sapiens
LFAKVPKLIHLTMMQMFFIL

SEQ ID NO: 30228 - protein, 298 aa, Homo sapiens
LHKTPASPVVHSRGLIDDVVEADLVEALQEFGPISYAVVMPKKRQALVEFEDVLGACNAVSYAADNQIYIAGHPAFVNYSTSQKISLPGDSDDSRSVNSVLLFTILNPIYSITTDVLYTICNPCGPVQRIIIFRKNGVQAMVEFDSVQSAQRAKASLNGAGIYSGCCTLKMEYAKPTRLNVFKNDQDTWDYTNPNLSGQGDPGSNPNKRQRQPPLLGDHPAEYGGPHGGYHSHYHDEGHGPPRPHYEGRRMGPPVGGHCRGPSRYGPPVWAPPTPSPTTRVWPSRRQPCARGLRLASI

SEQ ID NO: 30229 - protein, 200 aa, Homo sapiens [sequence omitted]

SEQ ID NO: 30230 - protein, 71 aa, Homo sapiens
MLSTVGIFVDISTDVRRNRNLQKTDDIEVLGELKRNITLCLICHWRQCNLVYALIIIITCLFIFKKKTQNL

SEQ ID NO: 30231 - protein, 23 aa, Homo sapiens
MSAFGTSGRSEPPTRIPGASLPD

SEQ ID NO: 30232 - protein, 44 aa, Homo sapiens
MSAFGTSGRSEPPTRIPGARCFPGLMEVEELRKLEKMDRSGKWS

SEQ ID NO: 30233 - protein, 11 aa, Homo sapiens
MWLSLLYTLPP

SEQ ID NO: 30234 - protein, 58 aa, Homo sapiens
MIWNGKGHFSFCSASQIQHRGAPRIPVILLTSPGRKKQLTWVFCCLLNYKDIILQAEG

SEQ ID NO: 30235 - protein, 18 aa, Homo sapiens
LCFPECLLRSMNAVMLGT

SEQ ID NO: 30236 - protein, 23 aa, Homo sapiens
MLLKLYLPCFRPDAFNKMDIFQL

SEQ ID NO: 30237 - protein, 43 aa, Homo sapiens
MQNYYNVVYLAHTQVRTSRLWQQISRDPSLGSHSVFEVVILLA

SEQ ID NO: 30238 - protein, 55 aa, Homo sapiens
VILLEFVGLCNQELHKGQVRWLTPIIPALWEAKVGGSQGQEIRTILANMVKCHLY

SEQ ID NO: 30239 - protein, 29 aa, Homo sapiens
MLSVGLRDMGITKQYSDICTIWGQRYIVQ

SEQ ID NO: 30240 - protein, 91 aa, Homo sapiens
LPFACVPGASPTTLAFPPVVLTGPSTDGIPFALSLQRVPFVLPSPQFVRLLESWPKNPAAHRLPVVSCCQAFTFSSVIPHGMRVVLSSRFP

SEQ ID NO: 30241 - protein, 247 aa, Homo sapiens
LLKMFYPIIMAMPIQKAKQNLFGQNRNFSNGHVVCEKKQQLELDSIVEETITGDYALIINGHSLAHALESDVKNDLLELACMCKTVICCRVTPLQKAQVVELVKKYRNAVTLAIGDGANDVSMIKSAHIGVGISGQEGLQAVLASDYSFAQFRYLQRLLLVHGRWSYFRMCKFLCYFFYKNFAFTLVHFWFGFFCGFSAQVGKSMFFFVCLFVCFCMILQMTLLHSSLLINSEHFLMADSSNSITIM

SEQ ID NO: 30242 - protein, 36 aa, Homo sapiens
MLVKLVSISWPHDPPPSAYQSAGIIGMSLCTGSSFL

SEQ ID NO: 30243 - protein, 17 aa, Homo sapiens
LKTIDIVNSSGWLETKV

SEQ ID NO: 30244 - protein, 88 aa, Homo sapiens
LWIRLSFRNNHTVNGHNGEVRKALLKQEMANASASQRGRSGSGNFGGGCGGVFSGNDNFGHGRNFSGHGGFDGSRGDGGYGGSGDGWL

SEQ ID NO: 30245 - protein, 69 aa, Homo sapiens
LSQQSSGHSTCTRFLLLHTRALCIPHPVRRLLLRWGVGVRTEDPRRVSESPSSWACDSSPGREKSGLPA

SEQ ID NO: 30246 - protein, 85 aa, Homo sapiens
LEDSFSGCPRDFAAQHPCSISSCNISAEALLLLATLPSILWFRCLLLLLKMEFVFLSLKSFLLLDYFQKMKGGLLTLCHLQTRRS

SEQ ID NO: 30247 - protein, 40 aa, Homo sapiens
LIWSMKCERSDIHFEAGTFRVAPTATLHTAARRTLKYRSF

SEQ ID NO: 30248 - protein, 70 aa, Homo sapiens
LSSSITAGTAAGVAGYLLLYWAREQSGEPSSCRRPAQSAARSRSLRSRPEVKGQGVGPPGVAGAEPPLVT

SEQ ID NO: 30249 - protein, 118 aa, Homo sapiens
LDWTERIPDGAEPGECRAWAEGIPAPSQPSDFGSRAGTCPASPRPPRAPVTCGLGAPNLPDPRSFPTPSLERLEKDFSCPLPWSAEAPPPPTAQMSPVTARRTSLRPGAEGSRERSPP

SEQ ID NO: 30250 - protein, 213 aa, Homo sapiens
VVLFTILLPLRTTGFHLPLKLVLSATLTGTAIYQVALLLLVGVVPTIQKVRAGVTTDVSYLLAGFGIVLSEDKQEVVELVKHHLWALEVCYISALVLSCLLTFLVLMRSLVTHRTNLRALHRGAALDLSPLHRSPHPSRQAIFCWMSFSAYQTAFICLGEPPLPATPSLGLGLPSDTGLSWGEECSASTALRVCLGMLWGSSKKEGPPCLPCP

SEQ ID NO: 30251 - protein, 157 aa, Homo sapiens
LCRPGCLSPIRPRCGKLSLKRGEEGNMDMKRRIHLELRNWTPSAVRELVLDNCKSNDGKIEGLTAEFVNLEFLSLINVGLISVSNLPKLPKLKKLELSENRIFGGLDMLAEKLPNLTRLNLSGNKLKDISTLEPLKKLECLKSLDLFNCEVTNMNDY

SEQ ID NO: 30252 - protein, 244 aa, Homo sapiens
LRSAPGLTRAGPALPEAVSPSHVIVDSADPAGPEKEIPGPWLLGAMRFRFCGDLDCPDWVLAEISTLAKMSSVKLRLLCSQVLKELLGQGIDYEKILKLTADAKFESGDVKATVAVLSFILSSAAKHSVDGESLSSELQQLGLPKEHAASLCRCYEEKQSPLQKHLRVCSLRMNRLAGVGWRVDYTLSSSLLQSVEEPMVHLRLEVAAAPGTPAQPVAMSLSADKFQVLLAELKQAQTLMSSLG

SEQ ID NO: 30253 - protein, 136 aa, Homo sapiens
VIVDSADPAGPEKEIPGPWLLGAMRFRFCGDLDCPDWVLAEISTLAKMSSVKLRLLCSQVLKELLGQGIDYEKILKLTADAKFESGDVKATVAVLSFILSSAAKHSVDGESLSSELQQLGLPKELKQAQTLMSSLG

SEQ ID NO: 30254 - protein, 159 aa, Homo sapiens
LRAQSVPAAPPLSVPAAAATATMPNFAGTWKMRSSENFDELLKALGVNAMLRKVAVAAASKPHVEIRQDGDQFYIKTSTTVRTTEINFKVGEGFEEETVDGRKCRSLATWENENKIHCTQTLLEGDGPKTYWTRELANDELILTFGADDVVCTRIYVRE

SEQ ID NO: 30255 - protein, 67 aa, Homo sapiens [sequence omitted]

SEQ ID NO: 30256 - protein, 195 aa, Homo sapiens [sequence omitted]

SEQ ID NO: 30257 - protein, 174 aa, Homo sapiens
VGGPSSFICISPRLGQWAAQGLWNAVLPSACARVCECDSGCGCGRGRGRRARRSPAAGGPARAPAPRARRGRVAQPSLETTPPLPVAVAMSVAGLKKQFHKASQLFSEKISGAEGTKLDDEFLDMERKIDVTNKVVAEILSKTTEYLQPNPGKVEIFSCSFAVTDSNNPCLLGV

SEQ ID NO: 30258 - protein, 436 aa, Homo sapiens
VGGPSSFICISPRLGQWAAQGLWNAVLPSACARVCECDSGCGCGRGRGRRARRSPAAGGPARAPAPRARRGRVAQPSLETTPPLPVAVAMSVAGLKKQFHKASQLFSEKISGAEGTKLDDEFLDMERKIDVTNKVVAEILSKTTEYLQPNPAYRAKLGMLNTVSKIRGQVKTTGYPQTEGLLGDCMLKYGKELGEDSTFGNALIEVGESMKLMAEVKDSLDINVKQTFIDPLQLLQDKDLKEIGHHLKKLEGRRLDYDYKKKRVGKIPDEEVRQAVEKFEESKELAERSMFNFLENDVEQVSQLAVFIEAALDYHRQSTEILQELQSKLQMRISAASSVPRREYKPRPVKRSSSELNGVSTTSVVKTTGSNIPMDQPCCRGLYDFEPENQGELGFKEGDIITLTNQIDENWYEGMIHGESGFFPINYVEVIVPLPQ

SEQ ID NO: 30259 - protein, 474 aa, Homo sapiens
MFTLLDVVNCKAHFIHDGPEDTSDQLVLEVSVMAWVPMPSCLRRGQTDLLPIQVNPVNDPPHIIFPHGSLMVILEHTHKPLGPEVLQAYDLDSTCEGLTFQLLGTPSGLPVEHRDQPGEPVTEFSCWELEAGSLVYVHCGGPTQDLTFRVSNGLQASPPAMLKVVAVQLAIQIHRSTGLHLAQGSAMPILPTNLLVETSAVGQDVTVLFHVTGGLPFRELQKQGAGGVEDAEWWVTQAFHQQDVEQGHVRYLSTDPQHYTEDTVENLDLQVQVSWEILSNLSFLVTIQRATVWMLQLEPLHTQNTQQEALTTAHLEATLEEAGPSPPTFHCEVVQAPRKGNLQLQGTMMSDGQGFTQDDVQAAEVTYGAMARASVAVEDTFCFHVTAPPYFSPLCTFSIHIGGDPDMPVLMVPEGGECVLSADQLFIKSLNSARYLYEVMEQPRHGRLTWRGTQDKITMVTSFTNGDLMHGQLV

SEQ ID NO: 30260 - protein, 46 aa, Homo sapiens
LLDLMACLGFYHMRRGCFFGVTRTEFPILFPRRDTMFSIKLKKSRA

SEQ ID NO: 30261 - protein, 30 aa, Homo sapiens
LQHLGTLQRVPSRKVSPEVNLRPWTSQPPE

SEQ ID NO: 30262 - protein, 133 aa, Homo sapiens
MLCYIILQSQKIFCIFFCYYRKISVSLPLSLSQSVCLFYSISLCVSLLLHISLCVSVYVSLSLSSFPCFSLTHTHTHSQLSKDTSVLTFTFCFKQHTHFTLNYTSHAHELSAPSVHPTCVFTFKAAPSPRPAT

SEQ ID NO: 30263 - protein, 69 aa, Homo sapiens
LRREDHLSPGGRGSSEPCSHHCALAWVTKLLFLVGGKKRKDLFEYVIDVTGKLVVEGISIGRVFIYGNK

SEQ ID NO: 30264 - protein, 55 aa, Homo sapiens
LRSGVQDQPGQHGEAPSLLKIQKKISRAQWLAPVIPATQEAEAGDSLEPGRRSLY

SEQ ID NO: 30265 - protein, 248 aa, Homo sapiens
LAKQGELPREVRRAQARLLNPPTAGAKPGPQDTVERPFYELWASDNPLDWPLFGQDEFFLEQTKKKGVKRPPRLHTKPSQAPAVEVAPAGASYNPYFEDHQTLLSAAHEVELQRQKEAEKLERQLALPATEQAATQESTFQVAVRGAAGGVRGSGGARPGRGAGGWGCRGLSHAHPPGRHREGDGAAAAAGEGCAQAAGTAGRVADCQAPAPAPGGVPAARDQGPGGPEAGGAGAAAEAAAGTAEGRG

SEQ ID NO: 30266 - protein, 32 aa, Homo sapiens
MNKCCGDQVLKEGNSPAVAGERSLKYVDFYKQ

SEQ ID NO: 30267 - protein, 28 aa, Homo sapiens
LRKPTRTCLGSSQAREVSPKRDSPRTAI

SEQ ID NO: 30268 - protein, 31 aa, Homo sapiens
MHSGSAATAETHPHLSRVLPGTRGFPKARLP

SEQ ID NO: 30269 - protein, 107 aa, Homo sapiens
LQYPHKGLTERASMDGRGAFWTVAIPRARQEGLGRLGLPFPVKRTPPAPQNPGGSTQAPQRVVGKSHSGIRMPAKSRNLRLESKLNRTAVCEALKRAPTTNLPGVGS

SEQ ID NO: 30270 - protein, 228 aa, Homo sapiens
MSQEVHTLKKEKYETHRGEKLERSLSKLKNQMAEPLLPEPPGVPSEVELQHLRKEVERVAAELQAQVDNNKRMSVLILGQKERLQEQDERLREQDARPQQLAEPQSSFEELVHKNKSALQLEQQVEELQEKLGEVKETVTSAPSKKGWEAGTSLCEPIILAPEWPYGPPGGEGGPEGASGEARTLIHPVLERQKPSESSSPLNRARGQYQRCGNWRRTSSGWSRTRKR

SEQ ID NO: 30271 - protein, 144 aa, Homo sapiens
LEGPAQVRQPRSLLPASGDPPPSPGTSLGHVCWDLLSLWDLPTYPGLGGAQARMQRPAGPLSIVRATECLQHSLSLACHCVNRRRSTAPASSRRLCSPGSSFLRARVNMYISQARPAGAARVCFSCDDTCTINYLFKGTWIIMK

SEQ ID NO: 30272 - protein, 154 aa, Homo sapiens
LRSLAGRKTGVAIHPVAWHPMGHGAHGGRWTVRAWRRCPQAVLPFPSFPQFTNRCLLKWLKLWDLVVFGHERPSRKPRPSVEPARVSKEATAPGKWKSHEQVLEEMLEAGLDPSQRPKQKVSPAGCAAGNKPEALHSAPAPLQPVDFLQEPWVW

SEQ ID NO: 30273 - protein, 106 aa, Homo sapiens
LQMAIWKAQVFLLLERPQEASNRGGRRSGSRCLTWRERERERQSRETCRGNGWRAKSRHRGHESRTPRSCRPRPELHAAEDPQARQTPTQTPRGRGPPTSTQTACG

SEQ ID NO: 30274 - protein, 107 aa, Homo sapiens
LGNMAIWKAQVFLLLERPQEASNRGGRRSGSRCLTWRERERERQSRETCRGNGWRAKSRHRGHESRTPRSCRPRPELHAAEDPQARQTPTQTPRGRGPPTSTQTACG

SEQ ID NO: 30275 - protein, 141 aa, Homo sapiens
LGDTARCSQPSNLWLPTQSPHPSELGPPQFRFKPWGWSWPCCPGTPRWLELGPRGPSAGSQEGRAGLPKGAKNAGRAVQGPGKGSSAPSRSVWDSSRCWLGIEVRGDFQRPPEPAVPPTTPPATLRCQCLVGFSGYAPCSH

SEQ ID NO: 30276 - protein, 68 aa, Homo sapiens
LELALLPWHPPVAGAGSPWPKCRVPRGQGGAPQRSKECREGGPGPWEGELGTLQVRVGLQPLLAGNRS

SEQ ID NO: 30277 - protein, 607 aa, Homo sapiens
LEAQGWLLVDTRVGRADCLPNPRALMQERPVSGSRAGLPSVLPARSVDGSSKQSPGEARRAAVPLVRRRLVLGGHVRARAWPSPTSSSPVCVLPDSAVVMEEGSPGEVPVLVEPPGLEDVEAALGMDRRTDAYSRSSSVSSQEEKSLHAEELVGRGIPIERVVSSEGGRPSVDLSFQPSQPLSKSSSSPELQTLQDILGDPGDKADVGRLSPEVKARSQSGTLDGESAAWSASGEDSRGQPEGPLPSSSPRSPSGLRPRGYTISDSAPSRRGKRVERDALKSRATASNAEKVPGINPSFVFLQLYHSPFFGDESNKPILLPNESQSFERSVQLLDQIPSYDTHKIAVLYVGEGQSNSELAILSNEHGSYRYTEFLTGLGRLIELKDCQPDKVYLGGLDVCGEDGQFTYCWHDDIMQAVFHIATLMPTKDVDKHRCDKKRHLGNDFVSIVYNDSGEDFKLGTIKGQFNFVHVIVTPLDYECNLVSLQCRKDMEGLVDTSVAKIVSDRNLPFVARQMALHANMASQVHHSRSNPTDIYPSKWIARLRHIKRLRQRICEEAAYSNPSLPLVHPPSHSKAPAQTPAEPTPGYEVGQRKRLISSVEDFTEFV

SEQ ID NO: 30278 - protein, 38 aa, Homo sapiens
LPEVLCLSKHSNICIWLLCFPSATVALPGRGVMWSFQP

SEQ ID NO: 30279 - protein, 234 aa, Homo sapiens
LGNGVPAGRLGLWATSSCFFCLFVCFFKGKPPGPQMAKGVPGPGDPGLDPPLRSPGPGRCLLLTWLWRAALQLGLGTGRLWGSSVPSLRLTVAPSMRSASWARPSSGQHGPHTQLPAHPGQPPLPLVHRHADALTRTHTQMHAHLHMLTHMFTHAHSRSHMLSRIHTRTYSCTCSHACVCTRTEHLPRTSTPPQAPLSPHAPLPNNTHSPLHRPPPAPTKAPASGHQSWCQSFA

SEQ ID NO: 30280 - protein, 40 aa, Homo sapiens
LTGSARRARSINWDAVLFCYYLPGTMWVPSPAWVGGSGWV

SEQ ID NO: 30281 - protein, 92 aa, Homo sapiens
MGVPGARCCCRGRKQNCVFFLAMLSCQSLPPPALRTAGFPNGSLGKRPSGSLGKRPSAPFRSNVYQPTEMAVVLNGGTIPTAPPSHTGRHLW

SEQ ID NO: 30282 - protein, 116 aa, Homo sapiens [sequence omitted]

SEQ ID NO: 30283 - protein, 151 aa, Homo sapiens
LESECFAFVVNLSETNWVVFLFDNSLLPLLGMLQDKRMEIDKHSLNIGDYNRTVGKGPGSRPQISKESSMERNPYFDKNGNPSMFGVGNTAAQPRGMQQPPAQPLSSSQPNLRAQVPPPLLSPQVNKLSLHSPVYLQKGSCMILYLNKMAN

SEQ ID NO: 30284 - protein, 121 aa, Homo sapiens
LLSDRKLGVWPSACLSLSVADSHAAVSVCLRPVHPCCGRLVPSLPSLSSVCCSVGHLPGGPAARHQSDRSYDSLIGDSGWVWILTPGLCLLSQTLICHPHAEPSCHPQKPIRLPPAHGMDF

SEQ ID NO: 30285 - protein, 136 aa, Homo sapiens
MMAASGRGIREKGGREGAGAGAPLESAGSEGDRAAGARRGRAGGAPRCRGWREKTAARGSAARRKGRGSRGWRKARGREPGWRACASPGSGEGGARGWELPGGGGGGGGQERAVARGAAHTGAVSSRRESGRESSR

SEQ ID NO: 30286 - protein, 47 aa, Homo sapiens
LPCPFGWEGYGNTCHTASLTCALLPLPLHSSFLPYPPSMGLASLSSG

SEQ ID NO: 30287 - protein, 52 aa, Homo sapiens
LSDCERLRTLEAWLGMEVFLAWGPGRTTVLGTGLRPPRGPECPVKSAQAASL

SEQ ID NO: 30288 - protein, 90 aa, Homo sapiens
LGAQESMMPDRVRSCEKKTDPQAPPRLNRPPPLLIGVLQRLLPSTAPRGRSISIRLRYYKHDFRNLELEALQAVQPHPLPDIQSALEASA

SEQ ID NO: 30289 - protein, 95 aa, Homo sapiens
LGTSPACGLEIPPTSGARPDGSCSLPAPVYHLKSRQWKGMGRGHRQRWRLQGRGDCDMGCVVQASGLFPAEMRERTTKKMATSPLDLCAGACWEM

SEQ ID NO: 30290 - protein, 71 aa, Homo sapiens [sequence omitted]

SEQ ID NO: 30291 - protein, 135 aa, Homo sapiens
MAAKTDPVPSRNGEGGRDQSREDEDNSTLLPSPQANQPAADRGPGHSQDKRMQAGKWHYCPCPPHPVMCDSRHQGRPRSPAAVGRNLPGATGAHSPPCRTGVSVDTPTPNSATKQASQLSSSFTLSDTITPATLF

SEQ ID NO: 30292 - protein, 190 aa, Homo sapiens
LESACWPRITWRCMRTRRLCEHKYGNAPRVRINGHVAARFPFIPMPLDYILPELLKNAMRATMESHLDTPYNVPDVVITIANNDVDLIIRISDRGGGIAHKDLDRVMDYHFTTAEASTQDPRISPLFGHLDMHSGAQSGPMHGFGFGLPTSRAYAEYLGGSLQLQSLQGIGTDVYLRLRHIDGREESFRI

SEQ ID NO: 30293 - protein, 162 aa, Homo sapiens
LRDLEHWILYSDRSERTRKTPRKSCLTGHVVVRAALTRLTSHSQVVTALGRAWHPEHFVCGGCSTALGGSSFFEKDGAPFCPECYFERFSPRCGFCNQPIRHVSPARPHRARPISPGELWDGPPPHGSRPTRDTPLHPYPFPLAMSTAPWTPLFLSDPHVPS

SEQ ID NO: 30294 - protein, 201 aa, Homo sapiens
MIPAMLSVLVKMMLAQTQESVFEKISLPGIWNEFFMLVKVAQEVGEVCRQLHAAMSQVLVKENIPYSWASLACVKAHHYAALAHYFTAILLIDHQGKKCLSQLYDHMPEGLTPLATLKNDQQRQQLGKSHLCRAMAHHEESVQEASLCKKLQSIEVLQKVLCAAQERSRLMYAQHQEDDDLLNLIDAPSVGPLSVFLANKQ

SEQ ID NO: 30295 - protein, 130 aa, Homo sapiens
LHYLEVYLTDEFAKGRKVADLYELVQYAGNIIPRLYLLITVGVVYAKSFPQSRKDILKDLVEMCRGVQHPLRGLFLRNYLLQCTRNILLDEGEPTDEETTSNISDSMDFVLLNFAEMNKFWVRMQHQGHS

SEQ ID NO: 30296 - protein, 85 aa, Homo sapiens
LRSPWLLFLLPQVGTGDASSFSQDRTMSLAAAPVREAPPPPTGASSEPSVPALPGADPQRSAELLLLAVTREGLERRIISRKRAE

SEQ ID NO: 30297 - protein, 614 aa, Homo sapiens
LLHKNCMLQEEIARLRLEIDALKNWNQQKEKNFLEDIKIAKEKNDFLQNALMLKEETFATMIFQDSIQPEVLKAENEMSSFKLKDKSQNQERLEREIESYRCRLAAALQDRDQSQASKRDVECDFQRTREEWFHLKEKMNFDMSNLKDKNELLSEKLSNAENKIRSLKMKWHQTKDALKEKTLVLEDVQRDLTQSQCRRKEIEQMFQNEEDKVSKYIQKQESLEERLSQIQNENLLLRQQLDEAYKKADNQEETIINIQEQFNAIVKNQAQSEEQSLLLEQKNNNLINKCDFIKKRLYKYEKEKAERNEIMRQLQQELADTVKKQPISEPPLEATPCYVNLDETQASKRKSDQIRSQADLTEAVETASSEGLHVNAEIEVLQQALLYMKTMQEKRETLQKDQEKLEEELVNLKSHMEMNMLECGQLEHYKQEVEERARQEIAEQLENIGLLLQSQKIAHDQLQLKEESNATMKSQMELRIKDLEFKLYKARTSQADCNTTELEKYKELYLEELKLRESLSDELNKRKEILADVSTKLLQEKEWSRSLFTSHTTRPVLESACNGNLNENLGLSRIHIPREALRIPTLNSLSSNIRMESDLSKEDKNGGHFLELQA

SEQ ID NO: 30298 - protein, 398 aa, Homo sapiens
VISEEEQERLEESENNELQISHGHKKEKDLLHKNCMLQEEIARLRLEIDALKNWNQQKEKNFLEDIKIAKEKNDFLQNALMLKEETFATMIFQDSIQPEVLKAENEMSSFKLKDKSQNQERLEREIESYRCRLAAALQDRDQSQASKRDVECDFQRTREEWFHLKEKMNFDMSNLKDKNELLSEKLSNAENKIRSLKMKWHQTKDALKEKTLVLEDVQRDLTQSQCRRKEIEQMFQNEEDKVSKYIQKQESLEERLSQIQNENLLLRQQLDEAYKKADNQEETIINIQEQFNAIVKNQAQSEEQSLLLEQKNNNLINKCDFIKKRLYKYEKEKAERNEIMRQLQQELADTVKKQPISEPPLEATPCYVNLDETQASKRKSDQIRSQIVSSLCWLFPLL

SEQ ID NO: 30299 - protein, 100 aa, Homo sapiens
LFAKSAETSVRITSANSQTVMDSQEHSDCINKGHRLFLSRLSFSLCHTSGAKLCRLGLFWDFLVYQGVLSVFCVWDISKCICQQQKKTNKNAGWMLKDKK

SEQ ID NO: 30300 - protein, 66 aa, Homo sapiens
MLAEIHPKAGLQSLQFIMELLYWLLEGGDSEDKEQLRLFSLDLENNAEIALSPMSEPGDQGCRRVK

SEQ ID NO: 30301 - protein, 19 aa, Homo sapiens
LPVLLKMLSILQYHQIYFV

SEQ ID NO: 30302 - protein, 84 aa, Homo sapiens
MLAEIHPKAGLQSLQFIMELLYWLLEGGDSEDKEDATGNVEMKNIQPLVFEISCDVFQSRCKEHGKIKVLEWFKYVLGIPVYRL

SEQ ID NO: 30303 - protein, 45 aa, Homo sapiens
MLAEIHPKAGLQSLQFIMELLYWLLEGGDSEDKEFSCRMPLEMLK

SEQ ID NO: 30304 - protein, 41 aa, Homo sapiens
VVQKMKLTIPVFLFKSLQFIMELLYWLLEGGDSEDKEVKPV

SEQ ID NO: 30305 - protein, 38 aa, Homo sapiens [sequence omitted]

SEQ ID NO: 30306 - protein, 67 aa, Homo sapiens
MLAEIHPKAGLQLPISFKNKFSGNISSSHGYQTFLVTEYTQSLQFIMELLYWLLEGGDSEDKEVKPV

SEQ ID NO: 30307 - protein, 46 aa, Homo sapiens
MLAEIHPKAGLQSLQFIMELLYWLLEGGDSEDKEVILSLLKEYFPL

SEQ ID NO: 30308 - protein, 24 aa, Homo sapiens
METGSWLQRRRGPWGRGGCQPANV

SEQ ID NO: 30309 - protein, 131 aa, Homo sapiens
LKKASHSSDTYCEPYTSWCQDTYSQSKPKMQSLVQWGLDSYDYLQNAPPGFFPRLGVIGFAGLIGLLLTRGSKMKKLVYLPGFMRLAASLYYPQQTIVFAQVSGERLYDWSLRFVEGELSKARKCEEFTWN

SEQ ID NO: 30310 - protein, 210 aa, Homo sapiens
LSGPGEAAGSRLLAAPGPPSHFPQEVPRRAGRAAALPQPRADAAAPGPGGLQAAARRAQVSVGPRPRPRGRSHPALAFAPPRSCFCRSHNLPQILALPPSFAPWSPLSQLPPPRVTSSPRALLDGLALNTHLRDLHLDLSACELRSAGAQVIQDLVCDAGAVSSLDLADNGEAAGEPILASSTRFPIPTLPLQLRLVRDPSHPQASAQTW

SEQ ID NO: 30311 - protein, 118 aa, Homo sapiens
LRSPRSFSHLGVGGGAAGWVRSPTPSSHPITVPPSGGWADGLHSKQLAPALGSQPGMMRCCRRRCCCRQPPHALRPLLLLPLGECGHPGPGPHPLLAQPSQAGHRVCGNAGCQGGEEL

SEQ ID NO: 30312 - protein, 173 aa, Homo sapiens
LEQRQYLPIFAVQQELLTIIRDNSIVIVVGETGSGKTTQLTQYLHEDGYTDYGMIGCTQPRRVAAMSVAKRVSEEMGGNLGEEVGYAIRFEDCTSENTLIKYMTDGILLRESLREADLDHYSAIIMDEAHERSLNTDVLFGLLREVRAVWFGLSAHGVLTSAPPVASGLLQVG

SEQ ID NO: 30313 - protein, 132 aa, Homo sapiens
VNIRTGMPCHLHPTSSLFGMGYTPDYIVYHELVMTTKEYMQCVTAVDGEWLAELGPMFYSVKQAGKSRQVRILCSSQGCCLPVGSVFPPLGIEDLRSSNPLTSLCKHKGCDPAGWVCLIPHHPLQLFGRLSL

SEQ ID NO: 30314 - protein, 34 aa, Homo sapiens
MKIWNSLIHSYKYYLVSLCLALCLVIEIYCSKAR

SEQ ID NO: 30315 - protein, 45 aa, Homo sapiens
LYNSGVFAFLRKIKVCKGILVCCFPFDTAVLFSHQKRDKELKISF

SEQ ID NO: 30316 - protein, 38 aa, Homo sapiens
MNSLMRICKRKQTRTIVYHHIAHARLSQTLTTCTRQAA

SEQ ID NO: 30317 - protein, 125 aa, Homo sapiens
LLCLAGSSPRPPEPDRRRHHHQRPGGPRAPRARLRSEPTKKEAACRGADMGLKMSCLKGFQMCVSSSSSSHDEAPVLNDKHLDVPDIIITPPTPTGMMLPRDLGSTGWTNQDANPRQLWNTNICQ

SEQ ID NO: 30318 - protein, 125 aa, Homo sapiens
LLCLAGSSPRPPEPDRRRHHHQRPGGPRAPRARLRSEPTKKEAACRGADMGLKMSCLKGFQMCVSSSSSSHDEAPVLNDKHLDVPDIIITPPTPTGMMLPRDLGSTVWLDETGSCPDDGEIDPEA

SEQ ID NO: 30319 - protein, 77 aa, Homo sapiens
LLCLAGSSPRPPEPDRRRHHHQRPGGPRAPRARLRSEPTKKEAACRGADMGLKMSCLKVWLDETGSCPDDGEIDPEA

SEQ ID NO: 30320 - protein, 65 aa, Homo sapiens
VMVSCSCCFCPRHCSLLVKSPKPSSASSALCALRKQRSKEVSKLVLAEEKTQNTQPQILKNIAKH

SEQ ID NO: 30321 - protein, 52 aa, Homo sapiens
LQPLKNACIRSSSLHIPRHSDGILQLLLLSKALQPTRQKPEAQLCQQCTVCS

SEQ ID NO: 30322 - protein, 45 aa, Homo sapiens
LGAVEPRKVVPRAERRTAQEPRRIAARTDPGLLHAHKRKRNYSGP

SEQ ID NO: 30323 - protein, 64 aa, Homo sapiens
VAYAGGRGSIVGDHLWSCVPRSKLLGCFLPEEVHYACLWRVDCVLRVHKDLRIRALLPLPQPVH

SEQ ID NO: 30324 - protein, 29 aa, Homo sapiens
MRTERMRDPEPQPPSPAPLEFLTYRNCKK

SEQ ID NO: 30325 - protein, 38 aa, Homo sapiens
LIWSCLLLSIDSEKLKTREGEWFTQFGTTDPNLALHED

SEQ ID NO: 30326 - protein, 35 aa, Homo sapiens
MGFTSEKPSEKLKTREGEWFTQFGTTDPNLALHED

SEQ ID NO: 30327 - protein, 73 aa, Homo sapiens
LRADSAGWERRQGRPSRTWLPARRGLARRPALATSALGCGLGAVEPRKVVPRAERRTAQEPRRIAARTDPVRN

SEQ ID NO: 30328 - protein, 29 aa, Homo sapiens
LDANGFASNCITVKTSSARVFRRYQVKYM

SEQ ID NO: 30329 - protein, 107 aa, Homo sapiens
VRRAGGGSWPNAPVGSACRRRGASDTARQARFLRADSAGWERRQGRPSRTWLPARRGLARRPALATSALGCGLGAVEPRKVVPRAERRTAQEPRRIAARTDPGFVKR

SEQ ID NO: 30330 - protein, 120 aa, Homo sapiens [sequence omitted]

SEQ ID NO: 30331 - protein, 29 aa, Homo sapiens
MMEEAEHVLPKTERTSLNTADVGDSRGTA

SEQ ID NO: 30332 - protein, 49 aa, Homo sapiens
LGPFSFPSARGRAVQPSPGLVSGSSGFTQEVHHPVVSSVFAIMQQSMQF

SEQ ID NO: 30333 - protein, 226 aa, Homo sapiens
MASRDTFLREGLMLMCSSCLPLRGWLYKGPGRRQCGQHTDPGAVGVGTVGRQRVPGRCRGGRQHLPSEMSPGEGPHRPPPALSLQVQQERDELYRKFTAAIQEVQQKTGFKNLVLERKLQALSAAVEKKEVQFNEVLAASNLDPAALTLVSRKLEDVLESKNSTIKDLQYELAQVCKAHNDLLRTYEAKLLAFGIPLDNVGFKPLETAVIGQTLGQGPAGLVGTPT

SEQ ID NO: 30334 - protein, 47 aa, Homo sapiens
LPPTALAKLGDLTLHVIPAPEESNLEIPPSAAGGREKKEKITASHNY

SEQ ID NO: 30335 - protein, 424 aa, Homo sapiens
LFRFSPSQWRVGWGGRSPKPLGDMEPRRAAPGVPGWGSREAAGSASAAELVYHLAGALGTELQDLARRFGPEAAAGLVPLVVRALELLEQAAVGPAPDSLQVSAQPAEQELRRLREENERLRRELRAGPQEERALLRQLKEVTDRQRDELRAHNRDLRQRGQETEALQEQLQRLLLVNAELRHKLAAMQTQLRAAQDRERERQQPGEAATPQAKERARGQAGRPGHQHGQEPEWATAGAGAPGNPEDPAEAAQQLGRPSEAGQCRFSREEFEQILQERNELKAKVFLLKEELAYFQRELLTDHRVPGLLLEAMKVAVRKQRKKIKAKMLGTPEEAESSEDEAGPWILLSDDKGDHPPPPESKIQSFFGLWYRGKAESSEDETSSPAPSKLGGEEEAQPQSPAPDPPCSALHEHLCLGASAAPEA

SEQ ID NO: 30336 - protein, 102 aa, Homo sapiens
LLMSDGLNTLSSFMLATQLNPLVEEEQLSSNCVCQIHRFIVNTLKDGRRVVILMELEVLKSAEAVGVKIGNPVPYNEEAEKKVITSDNSRERRKESSNHWPH

SEQ ID NO: 30337 - protein, 66 aa, Homo sapiens
VKDQEMSLLLHPAPLGAASVIHALPGPSTHCCECASPEPVKRQLSILETQIIRALPCTEEKGSTRP

SEQ ID NO: 30338 - protein, 44 aa, Homo sapiens
VQAALASPPPAAAHLLLLLLVRAGRPGLPLQRAAGPSPVPRPQG

SEQ ID NO: 30339 - protein, 33 aa, Homo sapiens
LPHFARLFFSLDKMSQLSIKVFPLLSPKKTIKS

SEQ ID NO: 30340 - protein, 14 aa, Homo sapiens
VSAGNRVESPGPGG

SEQ ID NO: 30341 - protein, 36 aa, Homo sapiens
LLLWVKSKKRKQVVHIQMQMERQRKKRKKAEKCTNS

SEQ ID NO: 30342 - protein, 34 aa, Homo sapiens
MSQMIGLLGFQTQDQQDSSHLYPSSPGHSAPNSE

SEQ ID NO: 30343 - protein, 180 aa, Homo sapiens
LPVQPVRPVSRVRDSPPASHLRPGRASLAGAGAGRQGAGLSLKGPRAAALRPLPGGGEDLSGCGDTQGRRRGRVPKLLAVSIRALGHSQPGLSTHRRSPADTRGLRHPLPSVRPPSPGTRAGSQARPLSGPRALAGLVHGGSDLPGVSEAIPSESALCSPPSPAGWIPETHCLKTTEGCR

SEQ ID NO: 30344 - protein, 84 aa, Homo sapiens
VGCGSGLGPRAACPCCCAVLASLTGRHPQPSSVVHKCLVAELPVNFWIPFLMQTLVLFSTCAVRTHWPSGVLTPTPPTPCLSPN

SEQ ID NO: 30345 - protein, 456 aa, Homo sapiens
LPPGTVRTATGAHGDVASVQRAGPPGGCSGTCRGPGLAWPARCPTSPPARMAPPGPASALSTSAEPLSRSIFRKFLLMLCSLLTSLYVFYCLAERCQTLSGPVVGLSGGGEEAGAPGGGVLAGGPRELAVWPAAAQRKRLLQLPQWRRRRPPAPRDDGEEAAWEEESPGLSGGPGGSGAGSTVAEAPPGTLALLLDEGSKQLPQAIIIGVKKGGTRALLEFLRVHPDVRAVGAEPHFFDRSYDKGLAWYRDLMPRTLDGQITMEKTPSYFVTREAPARISAMSKDTKLIVVVRDPVTRAISDYTQTLSKRPDIPTFESLTFKNRTAGLIDTSWSAIQIGIYAKHLEHWLRHFPIRQMLFVSGERLISDPAGELGRVQDFLGLKRIITDKHFYFNKTKGFPCLKKAEGSSRPHCLGKTKGRTHPEIDREVVRRLREFYRPFNLKFYQMTGHDFGWDG

SEQ ID NO: 30346 - protein, 22 aa, Homo sapiens
MWPPSSALARRGDALAPVGVQA

SEQ ID NO: 30347 - protein, 306 aa, Homo sapiens
LQPPVHLLQIHEGLLQHRGQHQGRLQPHLLCPGRRVLPCPQHLRGGLCVSFSRFSFGGACGLGGGYGGGFGSSSSFASGFGGGYGGGLGAGVGGGLGAGLGGGFAGGDGLLVGSEKVTMQHLSDRLASYLDKVRALEEANADLEVKIRDWYQRQRPSEIKDCSPYFKTIEDLRHKIIAATIENAQPILQIDNARLAADDFRTNYEHELALRQTVEAGVNGLCRVLDELTLARTDLEMQMEGLKEELAYLRKNHEEEMLALRGQTGGEVNVEMDAAPGVDLSCILNEMRNQYEQMAKHNHRDAGPGS

SEQ ID NO: 30348 - protein, 246 aa, Homo sapiens
LASSLHLPAYSPSSVFPPLPLLPSPSSPSSPGLLPPTVFFLIPHPFLPMSALVFFPPSSPLPIAFFPPSSPLPIAFFPPSSPLPIVFFPSLFSIFLPPPYPHLLLAAASSCRAFLSPHHLLFLFPTVLSPRPLLLTVFSPRLPHNRFLPRFLPLTPFSSHVLPPSRSSVCQSQSSSHFLLSPSHRLFSPASYSPPSSSPPHLLAAATSCRVFLSPHPLLPSSTPHRLRPRSSSCPPPSRALQLPFT

SEQ ID NO: 30349 - protein, 539 aa, Homo sapiens
LNWGEEQNLQNKEEVVIMETDLAEMPEKGVLSSQDSPHFQEKSTEEGEVAALRLTARSQAAAAAAAPGSRSLRGVHVPPPLHPAPAREEIKSTCSLKACFSLSLTLTYYRTAFLLSTENEGNLHFQCPSDVETRPQSKDSTSVQDFSKAESCKVAIIDRLTRNSVYDSNLEAALECENWLEKQQGNQERHLREMFTHMNSLSEETDHEHDVYWKSFNQKSVLITEDRVPKGSYAFHTLEKSLKQKSNLMKKQRTYKEKKPHKCNDCGELFTCHSVHIQHQRVHTGEKPYTCNECGKSFSHRANLTKHQRTHTRILFECRECKKTFTESSSLATHQRIHVGERPYECNECGKGFNRSTHLVQHQLIHTGVRPYECNECDKAFIHSSALIKHQRTHTGEKPYKCQECGKAFSHCSSLTKHQRVHTGEKPYECSECGKTFSQSTHLVQHQRIHTGEKPYECSECGKTFSQSSNFAKHQRIHIGKKPYKCSECGKAFIHSSALIQHQRTHTGEKPFRCNECGKSFKCSSSLIRHQRVHTEEQP

SEQ ID NO: 30350 - protein, 146 aa, Homo sapiens
LRHLLVGVMHPYPASGGVRLGSGQYRERFTRTPMPSSPGAGAVVTMLTPPFDSMHGRWLACGCISHSPPCYPQSWHRDPPHSFSSNSSPGAFLPGRRTTETCMCREAWQPADGGPRAPESPRNPCCGSQHGPGGVTILSTPDIPAP

SEQ ID NO: 30351 - protein, 105 aa, Homo sapiens
LQRPAASWEACGSHVGARASLHPAHRAPLGDQQEGQCGTPAATSPGPVSFLEIKKVCSRAKRSNKKPRVPASEGGSARPHLPAVLPLSQTPMPSAGRALERVSSP

SEQ ID NO: 30352 - protein, 27 aa, Homo sapiens
MYWEKKLQTFTKEWPASSFNRPFPNSP

SEQ ID NO: 30353 - protein, 191 aa, Homo sapiens
VDITLLFRASVKTVKTQNKALGVAVGGRVDGSRDELFRRSPWPKGNFSSRAREMISHSGKLRDFLLEHRKDYINAYSHTMSEYGRMTDTERDQIDQDVQIFMRTCSEAIQQLRTEAHKEIHSQQVKEHRTAVLDFIEDYLKKVCKLYSEQRAIRVKRVVDKKRISKLEPEPNAKTRESTSSEKVSQCPSKD

SEQ ID NO: 30354 - protein, 489 aa, Homo sapiens
LGSLQPTCEAVPLSPPLSPRPAERLQLPECSGNGATGATGGGTRGRAFRVCVSGVGGRGRGRCESGKMAAAAVVEFQRAQSLLSTDREASIDILHSIVKRDIQENDEEAVQVKEQSILELGSLLAKTGQAAELGGLLKYVRPFLNSISKAKAARLVRSLLDLFLDMEAATGQEVELCLECIEWAKSEKRTFLRQALEARLVSLYFDTKRYQEALHLGSQLLRELKKMDDKALLVEVQLLESKTYHALSNLPKARAALTSARTTANAIYCPPKLQATLDMQSGIIHAAEEKDWKTAYSYFYEAFEGYDSIDSPKAITSLKYMLLCKIMLNTPEDVQALVSGKLALRYAGRQTEALKCVAQASKNRSLADFEKALTDYRAELRDDPIISTHLAKLYDNLLEQNLIRVIEPFSRVQIEHISSLIKLSKADVERKLSQMILDKKFHGILDQGEGVLIIFDEPPVDKTYEAALETIQNMSKVVDSLYNKAKKLT

SEQ ID NO: 30355 - protein, 410 aa, Homo sapiens [sequence omitted]

SEQ ID NO: 30356 - protein, 40 aa, Homo sapiens
MQKEGVMEHQEGKRTQWIQYYHKGPYKKDSGESATERENI

SEQ ID NO: 30357 - protein, 91 aa, Homo sapiens
MVVFPSLSSPTMMTVCSGSVGGRAASGPNPKTKGLCAPTRPPRKEIALPAGWGPLPTVPRLLPTQLRHLPHSGTVEKTAEPPPPFTFQKSV

SEQ ID NO: 30358 - protein, 39 aa, Homo sapiens
LREKGRKLMAGSGFFPSQRVLLFQGGPRAGRGHTMPAPW

SEQ ID NO: 30359 - protein, 553 aa, Homo sapiens
VIFISILSFYLSGNRTAQWLGALPKISKYWGTPGRPWGVAVFLFQPHSASPSQDIQEVQGYVLIAHNQVRQVPLQRLRIVRGTQLFEDNYALAVLDNGDPLNNTTPVTGASPGGLRELQLRSLTEILKGGVLIQRNPQLCYQDTILWKDIFHKNNQLALTLIDTNRSRACHPCSPMCKGSRCWGESSEDCQSLTRTVCAGGCARCKGPLPTDCCHEQCAAGCTGPKHSDCLACLHFNHSGICELHCPALVTYNTDTFESMPNPEGRYTFGASCVTACPYNYLSTDVGSCTLVCPLHNQEVTAEDGTQRCEKCSKPCARVCYGLGMEHLREVRAVTSANIQEFAGCKKIFGSLAFLPESFDGDPASNTAPLQPEQLQVFETLEEITGYLYISAWPDSLPDLSVFQNLQVIRGRILHNGAYSLTLQGLGISWLGLRSLRELGSGLALIHHNTHLCFVHTVPWDQLFRNPHQALLHTANRPEDECGKTGSPVCALPICQHTAVPRGPWQQRSWTCADCPSLCTLLDSAQLWLAWPLGMASLAGSYLPWHPSLPLCF

SEQ ID NO: 30360 - protein, 64 aa, Homo sapiens
LPSNLALDGSLADLIKKLPVQTSINAGSTSKHCGDMSVPPSRPSILNSGCSLDIPEELSKETSA

SEQ ID NO: 30361 - protein, 33 aa, Homo sapiens
MTAAVSLTRSPAISASCAASRSASPWAWPWTWF

SEQ ID NO: 30362 - protein, 62 aa, Homo sapiens [sequence omitted]

SEQ ID NO: 30363 - protein, 457 aa, Homo sapiens
LPPPLGILYLGTLFPKLAHTLLPNKKISLFFWAPSPGKLLPELLQPYTERVEHLSEFLVDIKPSLTFDVIPLLDPYGPAGSDPSLEFLVVSEETYRGGMAINRFRLENVTPEGDWQREWMGDGEGHFEGAVGSTMAPEERSGGSGWWEEARRNWFSVCPLSRRRRSLGRKGRMGGQVGCQGLPLTPSFPLFTLSSLPQDLEELALYQIQLLKDLRHTENEEDKVSSSSFRQRMLGNLLRPPYERPELPTCLYVIGLTGISGSGKSSIAQRLKGLGAFVIDSDHLGHRAYAPGGPAYQPVVEAFGTDILHKDGIINRKVLGSRVFGNKKQLKILTDIMWPIIAKLAREEMDRAVAEGKRVCVIDAAVLLEAGWQNLVHEVWTAVIPETEAVRRIVERDGLSEAAAQSRLQSQMSGQQLVEQSHVVLSTLWEPHITQRQVEKAWALLQKRIPKTHQALD

SEQ ID NO: 30364 - protein, 52 aa, Homo sapiens
LIPPQIGRSPDCVHTPSSSFLLQPWLDHDITWWRLFFKKNSGQIYKNDAQAA

SEQ ID NO: 30365 - protein, 89 aa, Homo sapiens
LESGEGLGSGVEGKAKSKYLPFRHLLGPRPHKPVVGRAKYDDYVPRKKVPQLFRTTVGRKNGGVLEPSVCDFMCQSSSQDLKLLDHGHG

SEQ ID NO: 30366 - protein, 94 aa, Homo sapiens
LRGAQDSPGSPRIAPRIRVAPSLFREYQLMSVRQPKPGRRSGSQPSGVGRRKKVPQLFRTTVGRKNGGVLEPSVCDFMCQSSSQDLKLLDHGHG

SEQ ID NO: 30367 - protein, 45 aa, Homo sapiens
LMSVRQPKPGRRSGSQPSGVGRRSGEWGRGESKVQIPSLQTPPGA

SEQ ID NO: 30368 - protein, 195 aa, Homo sapiens [sequence omitted]

SEQ ID NO: 30369 - protein, 213 aa, Homo sapiens
LTTFVSPPCSVPCPPGLPHFLSFFKKKKKYGGGRGLEEPRPGLCSLRDISPWGSSSRDSNYQTKPAPDQPGPPHPLLHLRFRHGQWTGEWGWGVPKSLMRPSTPAAQSKVGWKLGEDPFLPRGACHLDPCIGTGGREHGEEEGRCLQENRHCPGGPLPCPLQEGAAWTRSWGRGQKCFLYMCIYFFLSSELSTRRFLPISAAVSVVISGRGRV

SEQ ID NO: 30370 - protein, 277 aa, Homo sapiens
VRRVVAPARCERRAAQTARLFCSAEGRAVGRGLRYAASVRDATAATRLAAFLGATPPGDPTRRASSAAPIPLGLLGAALSSVTLYTRKLAGTMGKKQNKKKVEEVLEEEEEEYVVEKVLDRRVVKGKVEYLLKWKGFSDEDNTWEPEENLDCPDLIAEFLQSQKTAHETDKSEGGKRKADSDSEDKGEESKPKKKKEESEKPRGFARGLEPERIIGATDSSGELMFLMKWKNSDEADLVPAKEANVKCPQVVISFYEERLTWHSYPSEDDDKKDDKN

SEQ ID NO: 30371 - protein, 107 aa, Homo sapiens
VRGRSRCAVAGSGCLSGDGATTGGPGRLESGMKENSASSLLSKPRGRLRLKRSRMEEGIGTHLQTSTVSRKFGSIPSPRTHQPRSWQNPLTNQENTDPVCLLTTEWN

SEQ ID NO: 30372 - protein, 112 aa, Homo sapiens
VRGRSRCAVAGSAVSSPSPASAEIPGPIETRTSLSATASHASAAGNPAISAPAEKVPGCRRRRREREERLGGSPGRGVVRLRERPGCGHTGLVNSHLLGSCSRTHSLPHPLF

SEQ ID NO: 30373 - protein, 67 aa, Homo sapiens
MRRRRVRLRLKRSRMEEGIGTHLQTSTVSRKFGSIPSPRTHQPRSWQNPLTNQENTDPVCLLTTEWN

SEQ ID NO: 30374 - protein, 115 aa, Homo sapiens
MDKMRRDRDKSILLCFQETSSCLSGDGATTGGPGRLESGMKENSASSLLSKPRGRLRLKRSRMEEGIGTHLQTSTVSRKFGSIPSPRTHQPRSWQNPLTNQENTDPVCLLTTEWN

SEQ ID NO: 30375 - protein, 82 aa, Homo sapiens
MDKMRRDRDKSILLCFQETSSRLRLKRSRMEEGIGTHLQTSTVSRKFGSIPSPRTHQPRSWQNPLTNQENTDPVCLLTTEWN

SEQ ID NO: 30376 - protein, 34 aa, Homo sapiens
LQAPAAGMDRRGGGRGGGGGGGRPGGLEPNRQYL

SEQ ID NO: 30377 - protein, 366 aa, Homo sapiens
LGESGAAGAEGGAERRSGAAEPRRSWGPSRRSGRTSGTSSGGRAARSWTRGGGRRLHSWTEGGGVGPGRPAEGRAAGRRGLEHGTARLKEQEGEGGLGPRKEKGRARGRERRRKMQLTRCCFVFLVQGSLYLVICGQDDGPPGSEDPERDDHEGQPRPRVPRKRGHISPKSRPMANSTLLGLLAPPGEAWGILGQPPNRPNHSPPPSAKVKKIFGWGDFYSNIKTVALNLLVTGKIVDHGNGTFSVHFQHNATGQGNISISLVPPSKAVEFHQEQQIFIEAKASKIFNCRMEWEKVERGRRTSLCTHDPAKICSRDHAQSSATWSCSQPFKVVCVYIAFYSTDYRLVQKVCPDYNYHSDTPYYPSG

SEQ ID NO: 30378 - protein, 81 aa, Homo sapiens
LEPRGAPSADLEQQSHGAAGALRGARGAHLGPRAGAVPRAAGPGEGGGGCTAGPKGAGSALGDPLRGGPRAAGDWSMGRRA

SEQ ID NO: 30379 - protein, 92 aa, Homo sapiens
LDGAALSAAGTGGAGPGRRACAGSVLCVCLWVGGGEGSLVKPLIADFCVKNRVLGAGNKACPGALESELSKERASGIPWSRKNFSDGRRTFA

SEQ ID NO: 30380 - protein, 502 aa, Homo sapiens
LGSCSQAPVQQRRPEIAPEHQRDEHPDLGALRGGRPRGAAHPGGASRPAAVLSAPRECPPAGSEPKQGSPRLCIPISMSCAGVVVCHVPTSSGLGLLGGLSVSAAWRIRLSSSRASDLAPQRREDKPYFDPTLTLFAFFPQPGACQANETIFCELGNPFKRNQRMELLIAFEVIGVTLHTRDLQVQLQLSTSSHQDNLWPMILTLLVDYTLQTSLSMVNHRLQSFFGGTVMGESGMKTVEDVGSPLKYEFQVGPMGEGLVGLGTLVLGLEWPYEVSNGKWLLYPTEITVHGNGSWPCRPPGDLINPLNLTLSDPGDRPSSPQRRRRQLDPGGGQGPPPVTLAAAKKAKSETVLTCATGRAHCVWLECPIPDAPVVTNVTVKARVWNSTFIEDYRDFDRVRVNGWATLFLRTSIPTINMENKTTWFSVDIDSELVEELPAEIELWLVLVAVGAGLLLLGLIILLLWKCGFFKRARTRALYEAKRQKAEMKSQPSETERLTDDY

SEQ ID NO: 30381 - protein, 93 aa, Homo sapiens
LQPQVRIRTFTAAPTGAPQLGASRGLGCWSGWRRVGGVEELGCKPHAGSSGQSALKPSLVKEGKMAPGPQAGKEVSKEEGWRVRRGWQRVRRG

SEQ ID NO: 30382 - protein, 66 aa, Homo sapiens
LGPLHCGEEGRGAREPRGGPATSALASWPPRLHLASPAAGMRRAPGAGGQRSGSGDMCAGPDRPRP

SEQ ID NO: 30383 - protein, 23 aa, Homo sapiens
MTVSESQCHYIEHFRHRKNKRGF

SEQ ID NO: 30384 - protein, 82 aa, Homo sapiens
LQTTHWPRAAVPRVAAVRLRHLVRRSQLPRWLPPASFQIMKVFFLHQIERKSVVKLPVDQVPWQEGLAYATLCRIVFSAYRA

SEQ ID NO: 30385 - protein, 62 aa, Homo sapiens
LLPRWLPPASFQIMKVFFLHQIERKSVVKLPVDQVVPRESVPWQEGLAYATLCRIVFSAYRA

SEQ ID NO: 30386 - protein, 1003 aa, Homo sapiens
LARLLQEAPGKLSLDVEQAPSAQHSQAQLSGQQQRLLAFFKCCLLTDQLPLAHHLLVVHHGQRQKRKLLTLDMYNAVMLGWARQGAFKELVYVLFMVKDAGLTPDLLSYAAALQCMGRQDQDAGTIERCLEQMSQEGLKLQALFTAVPLSEEDRATVLKAVHKVKPTFSLPLQLPPPVNTSKLLRDVYAKDGRVSYPKLHLPLKTLQCLFEKQLHVELASRMCVVSVEKPTLPSKEVTHARKTLKTLRDQWEKALCRELRETKNRLERQVYEGRFSLYPFLCLLDECEVVRMLLQVLQALPAQGESFTTLARELSARTFSRHVVQRQRVSAQVQALQNHYRKYLCLLASDAEVPEPCLPRQYCEALGAPEALREQPWPLPVQMELGKLLAEMLVQATQMPCSLDKPHRSSRLVPVVYHVYSFRNVQQIGILKPHPAYVQLLEKATEPTLTFEAVDVPMFCPPLPWTSPHSGAFLLSPTKLMRTVEGATQHQELLETCPPTALHGALDALAQLGNCAWRVNGRVLDLVLQLFQAKGCPYLGVPAPPSEAPQPPEAHLPHSAAPARKAELHRELAHCQKVAREMHSLRAEALYRLSLAQHLRDRVFWRPHNMDFRSRTYPCPPHFNHLGSDVARALLEFAQGRPLGPRGLDWLKIHLVNLTGLKKREPLRKRLAFAEEVMDDILDSADQPLTGRKWWMGAEEPWQTLACCMEVANTVRASDPAAYVSHLPVHQDGSCNGLQHYAALGRDSVGAASVNLEPSDVPQDVYSGVAGQVEVFRRQDAQRGTRVAQVLEGFITREVVKQTVMTMVYGVTRYGGRLQIEKRLRELNDFPQEFVWEASHYLVRQVFKSLQEMFSGTRAIQHWLTESARLISHTGSVVEWVTPLGVPVIQPYRLDSKVKQIGGGIQSITYTHNGDISRKPNTRKQKNGFPPNFIHSLDSSHMMLTALHCYRKGLTFVSVHDCYWTHAADVSCHEPGVPGAVCPLAQRAHPAGPVQVPGQAVLL

SEQ ID NO: 30387 - protein, 56 aa, Homo sapiens
VRSGPARARGVRAGGRGSPLALLIRMKTLLFGVWTLLALILCPGIQKDTSLGITVY

SEQ ID NO: 30388 - protein, 120 aa, Homo sapiens
LSFSLQPLALLIRMKTLLFGVWTLLALILCPGVPEELFEVSIWPSQALVEFGQSLVVNCSTTCPDPGPSGIETFLKKTQVGKGPQWKEFLLEDVTENSILQCFFSCAGIQKDTSLGITVY

SEQ ID NO: 30389 - protein, 696 aa, Homo sapiens
LHCEAPAEPLPAQAASGTQDGVHVQEPHPQAPSPLDLQQPVESTSGQQPSSTVSETAREVGQGNGLQKAQAHDGAGLKLVVSSPTSPKNKSWISEDDFYRPSREQPLKSASDHPIASYRGTPESRPGLHRHFSQEPRKNCSLGALDQACVPSPGRRQAQAAPSQGHKSFQVVHRRQMGLSNPFQGLMKLGTVERQGAMGIWKELFCELSPLEFRLYLSNEEHTCVENCSLLRCESVGPAHSDGRFELVFSGKKLALRASSQDEAEDWLDLVREALQKVRPQQEDEWVNVQYSDQPEEPPEAPQGCLSPSDLLSEPAALQGTQSDWSSAQVPELDAIKESLLYLYMDRTWMPYIFSLPLEALKCFRIRNNEKMLSDSHGVETIRDILPDTSLGGPSFFKIITAKAVLKLQAGNAEEAALWRDLVRKVLASYLETAEEAVTLGGSLDENCQEVLKFATRENGFLLQYLVAIPMEKGLDSQGCFCAGCSRQIGFSFVRPKLCAFSGLYYCDICHQDDASVIPARIIHNWDLTKRPICRQALKFLTQIRAQPLINLQMVNASLYEHVERMHLIGRSREQLKLLGDYLGLCRSGALKELSKRLNHRNYLLESPHRFRVADLRQIADEVYEGFLKALIEFASQHVYHCDLCTQRSFICQICQHHDIIFPSEFDTTVRCAKCKTVFHQSCQAVVKKGCPRCAR

SEQ ID NO: 30390 - protein, 142 aa, Homo sapiens
LIENHGAKSSGSLAGKTKVHAAQQMIVEHLSEPKSLGECGDFLEGGCRLPESPPNGRAEKGEGGGGCSQEGAREEQGLGASRNMPAVGGRGRGATVNGFPSEVVGADGSFCLLALKRVFCQGHSLFLLRKHPPNANNIPTSC

SEQ ID NO: 30391 - protein, 15 aa, Homo sapiens
MVLHERLTAIRGCGT

SEQ ID NO: 30392 - protein, 7 aa, Homo sapiens
MPDHGAS

SEQ ID NO: 30393 - protein, 105 aa, Homo sapiens
LFLLRVKRPVFVCCKQPWNSNSSHLFGIWPPSSRMIHGSVQKFIRLSDLRAVGEGFSSRTDGEGSCSPSSTFFASIIHKNTFGRAKNEHCRSLQPCFVTQMHSLL

SEQ ID NO: 30394 - protein, 71 aa, Homo sapiens
LKKTHYDRPCPSSLWKVFPLLLLLMRLFPLPVPGNQRAFYHTLSCPPPPMSAVPLYSAILVCSIIFQPDTE

SEQ ID NO: 30395 - protein, 9 aa, Homo sapiens
LGNTERPHL

SEQ ID NO: 30396 - protein, 24 aa, Homo sapiens
MQAWKVQGALWRMGRTDPHSHQEV

SEQ ID NO: 30397 - protein, 72 aa, Homo sapiens
LGRQAGGIFPSPPWSSPVTCGRLFQHGLLPSWCTFWRTWWNQRFLADSVGALNQERTRKRMGRTDPHSHQEV

SEQ ID NO: 30398 - protein, 45 aa, Homo sapiens
LFCLTAGSPSWRWNQRFLADSVGALNQERTRKRMGRTDPHSHQEV

SEQ ID NO: 30399 - protein, 80 aa, Homo sapiens
LLVAPQVPPPESWFLRLRRICSEGLWEAWVMWVQGSHPPVEALDLRITNSHPTDFRPPTRAVFLLLHSALKSPKPLPGAA

SEQ ID NO: 30400 - protein, 48 aa, Homo sapiens
LALLAAMCKTCVPGKAPLSLQRSSESHGRSQQSSKCRLGKSRGLCGGD

SEQ ID NO: 30401 - protein, 16 aa, Homo sapiens
LADSVGALNQERTRKR

SEQ ID NO: 30402 - protein, 12 aa, Homo sapiens
LVFFPLHPGLLL

SEQ ID NO: 30403 - protein, 60 aa, Homo sapiens
LCLLLTGGSRSGVGPRHFPAQLNHISCACPCDLLTGKEEMTEGEGRAFEVFFPLHPGLLL

SEQ ID NO: 30404 - protein, 40 aa, Homo sapiens
LRDDPPSALSSLAERLSRRGSLVGAGDARGRKARSGVQAG

SEQ ID NO: 30405 - protein, 13 aa, Homo sapiens
VFAYNLLPSSYIL

SEQ ID NO: 30406 - protein, 108 aa, Homo sapiens
VIIGMRTHSSNCLKIEWTGSHLLKFLGSSGVTIPLKNSVFLAEICDCLFLSYFNLCVKHENLSSLGFIIRSHWHALSPLKHATVLWLSPCANLPLIFLDIDTKCICIF

SEQ ID NO: 30407 - protein, 71 aa, Homo sapiens
LCLLLTGGSRSGVGPRHFPAQLNHISCACPCDLLTGKEEMTEGEGRAFEGRRRGWRKKLDHLVTWKERSEL

SEQ ID NO: 30408 - protein, 53 aa, Homo sapiens
LTLNLNLSLLFLQQRAISPAQLARRQVMLQEKIHSLCPWNYQSSKPVQHLPTM

SEQ ID NO: 30409 - protein, 39 aa, Homo sapiens
LVSAMTSPWNRLTAYDLIGDLYMGPTPIFPQETHTLIKG

SEQ ID NO: 30410 - protein, 30 aa, Homo sapiens
LSRFPNFLGIYFDKFIAIMFLRDLETPANC

SEQ ID NO: 30411 - protein, 120 aa, Homo sapiens
LSRGTAAPTPSTPSEGASRTSGLLSGLLSLWLQDDPVRDTGLSFSCRGPRACLDFSIPRGARLYPLCACDPLHPPPGSELAQPPPTTPDSTQASPFPPLELCNNKCRMLSPHVSVPSIHL

SEQ ID NO: 30412 - protein, 162 aa, Homo sapiens
MAGKKNVLSSLAVYAEDSEPESDGEAGIEAVGSAAEEKGGLVSDAYGEDDFSRLGGDEDGYEEEEDENSRQSEDDDSETEKPEADDPKEKLGTVTEAPRAQQAHGPACWTQRAEESHSKHDKRRDSTTSAEPGSTHTPHSFPSPGSQKPQEATGRLLASYFT

SEQ ID NO: 30413 - protein, 26 aa, Homo sapiens
LMSLLLLRGARHLVTCHFRICVNQTI

SEQ ID NO: 30414 - protein, 557 aa, Homo sapiens
LSPQAATVLFLHATQKDLSDFHQSMAQWLAYSRLYQSLEFPSSCLLHPITSIEYQWIQGRLKAEQQEELAASFSSLLTYGLSLIRRFRSVFPLSVSDSPARLQSLLRVLVQMCKMKAFGELCPNTAPLPQLVTEALQTGTTEWFHLKQQHHQPMVQGIPEAGKALLGLVQDVIGDLHQCQRTWDKIFHNTLKIHLFSMAFRELQWLVAKRVQDHTTVVGDVVSPEMGESLFQLYISLKELCQLRMSSSERDGVLALDNFHRWFQPAIPSWLQKTYNEALARVQRAVQMDELVPLGELTKHSTSAVDLSTCFAQISHTARQLDWPDPEEAFMITVKFVEDTCRLALVYCSLIKARARELSSGQKDQGQAANMLCVVVNDMEQLRLVIGKLPAQLAWEALEQRVGAVLEQGQLQNTLHAQLQSALAGLGHEIRTGVRTLAEQLEVGIAKHIQKLVGVRESVLPEDAILPLMKFLEVELCYMNTNLVQENFSRSVAAPALGALATSPSPPTAPPSWAPASVLRGVAAPALGALATSPSPPTAPLSWASASVLRGGGESLW

SEQ ID NO: 30415 - protein, 176 aa, Homo sapiens
LPPCLPPSSLYPTPPIGAVLGLGEGRGRLVLPPGLIINNYQELALWDIRAPGLGRGAAQLPMPARSPQCCPAYLPHRLGLFWEHGASPVPVSLSASPLEGTLWPPPPPQSSSLSLAPTATLSLMSHFRPARRSFLTGTRECMSVHLVAAGWGREQGPLTLCAGRDLPPAPQPASSP

SEQ ID NO: 30416 - protein, 192 aa, Homo sapiens
LPPCLPPSSLYPTPPIGAVLGLGEGRGRLVLPPGLIINNYQELALWDIRAPGLGRGAAQLPMPARSPQCCPAYLPHRLGLFWEHGASPVPVSLSASPLEGTLWPPPPPQSSSLSLAPTATLSLMSHFRPARCLPGPCQTLLTFPLLVCAGLRRPPRPHSTQPGSSCSPRHPSFPSLSWVMLLPPCVTFEAVK

SEQ ID NO: 30417 - protein, 34 aa, Homo sapiens
LEDMATPVGVEHGEQSQAFSDDGKAAWVGKRGLP

SEQ ID NO: 30418 - protein, 39 aa, Homo sapiens
LEDMATPVGVEHGEQSQAFSDDGWLGGLKVLDEKMLSKR

SEQ ID NO: 30419 - protein, 40 aa, Homo sapiens
LEDMATPVGVEHGEQSQAFSDDEAFLCLASAETVKSRAPG

SEQ ID NO: 30420 - protein, 36 aa, Homo sapiens
LEDMATPVGVEHGEQSQAFSDDGAVSLSFQSRKRIL

SEQ ID NO: 30421 - protein, 20 aa, Homo sapiens
MATPVGVEHGEQSQAFSDDD

SEQ ID NO: 30422 - protein, 55 aa, Homo sapiens
MVRLPGWENGVFLDTTLTYLASLPQRRSGDDNLGFSLIGWLGGLKVLDEKMLSKR

SEQ ID NO: 30423 - protein, 25 aa, Homo sapiens
MLLCEGRELKPVLGVIGPASAGESA

SEQ ID NO: 30424 - protein, 29 aa, Homo sapiens
MRIRVDIQASYGKKLLKIQNANYFNDKNE

SEQ ID NO: 30425 - protein, 25 aa, Homo sapiens
MRIRVDIQASYGAVSLSFQSRKRIL

SEQ ID NO: 30426 - protein, 19 aa, Homo sapiens
MPSCVSSCLVTHYSDFVIC

SEQ ID NO: 30427 - protein, 11 aa, Homo sapiens
LLMGCHPQPLL

SEQ ID NO: 30428 - protein, 19 aa, Homo sapiens
LIKVLLVSPQSAFQEQIFA

SEQ ID NO: 30429 - protein, 94 aa, Homo sapiens
LEAPLLGHPASAPTRFQQKMRNIPRRLAENMQQPLFSSCPSLMRAFEVTSAGHPDQLCSYSQNQVLFIAMVMKGAPCKSLEGHMFTDCQLWRVM

SEQ ID NO: 30430 - protein, 97 aa, Homo sapiens
MRNIPRRLAENMQQPLFSSCPSLMRAFEVTSAGHPVSLLWPRLECGGVTSAHCILRLPGSSDGITGACHNAQLIVCIFSRDEVSPCWPGWSRTPDLR

SEQ ID NO: 30431 - protein, 41 aa, Homo sapiens
VCSLSSSKGTLAAEGRPGPMGSFGSAAAGGFKRPSKCLLST

SEQ ID NO: 30432 - protein, 37 aa, Homo sapiens
MLPIGWSQALGLSFPASAFKYAGVTGMSHCTGPDWYI

SEQ ID NO: 30433 - protein, 47 aa, Homo sapiens
LIPQSWLSGGSSHPDSLATPQQGGSRVSVSFCEGFFFPLAWEFFPFL

SEQ ID NO: 30434 - protein, 215 aa, Homo sapiens
LLEPLVEFASKPIWSWVFGRILIRFNLCICYRSFGLSILESVASLCVSWSFSVSSMLSHLLAYRRSRDFIDVCEVSENVPAFTPAFSHWHLLLTWAIWPCMVLGESSLTLQMLSSDLAGKGDQECRAPAEDSPKPKSQRVGAPTTSACMPFPGSPQADSQHPLPKDRAVPDQHPTKSSVRPVFGGAGFQEDSGGGVELMAGGSGPLRKLCHWAWG

SEQ ID NO: 30435 - protein, 172 aa, Homo sapiens
LVGVGVLVVSAALPQALREGPWDPRHPRLASAPHPGVGLAPPQPRVKTLLEGRAPRGPRPTLPSPAQPSPALPGAAAREAGGGARASSWQPHRLRGPGPLPPPPLDPRPPALPGCGWTRLRGARGCLSRDHQGPPGALPGNPHPWPQRSGATRVSPWLPAMGPRANPGRTQE

SEQ ID NO: 30436 - protein, 192 aa, Homo sapiens
LEEAGDLPEDPQKVPEADGQPAVQPAKEDLGPGDRGLHPRPQAVLSEQQNGLAVGGGEKAKGGPPPGNAAGDTGQPAEDSDHGGCQPGLVSEDTPLLGWGGWAGAAESMVPPSVPSLSPCTRLACKWSGPRQLVGTGRGWWLTATVISVTQLFARPLNVRCRAVLVCLGAHGGRRGGRLTGNTLLSARLRAA

SEQ ID NO: 30437 - protein, 137 aa, Homo sapiens
LKPRCPQGPAAPRGSGQSPSAFPAPPGSRAPRPVAPSLWPLPSSHAEIPEAGPAPFTAPPASCCFPHAAMVQGSSSHHLPNRSLQGCTPCLRGCAWALAGGGHSRQGRPSAAGCRASETNQALEGTVAGPDVSSSSN

SEQ ID NO: 30438 - protein, 144 aa, Homo sapiens
VRPRAGAAAAPEGALAAPFRPDPLRPGRGRVRSSREGQESPGLRLTDLLLLRFFFQPKQLPDKWQHDLFDSGFGGGAGVETGGKLLVSNLDFGVSDADIQVVSSIHWKPLLVNSSSRCVPAAGVSPHSGFPLQLPACLRSGQFP

SEQ ID NO: 30439 - protein, 66 aa, Homo sapiens
VGAAVLVGPCGEGRALGAACPGPRPDPGTEAVDVLATLNPMSFQPRMPWPIGNAVKCKLSYYIFFW

SEQ ID NO: 30440 - protein, 57 aa, Homo sapiens
VESEAEAWGARELPPPEVTRPGPALPSLLPPGAPGRGGGGGRGPAGLASALRHLELR

SEQ ID NO: 30441 - protein, 174 aa, Homo sapiens
LVLATRDWLTHPLAVPGVWALPVTVGKKMALLCYNRSCGQRFDPETNSDDACTYHPGVPVFHDALKGWSCCKRRTTDFSDFLSIVGCTKGRHNSEKPPEPVKPEVKTTEEKELSELKPKFQEHIQAPKTVDAIKRPSPDEPMTNLELKISASLKQALDKLKLSSGNEENKKRRQ

SEQ ID NO: 30442 - protein, 36 aa, Homo sapiens
LRSHTAAWFPGRAFSTLCVMDDHPRHQGMHRCGNRN

SEQ ID NO: 30443 - protein, 12 aa, Homo sapiens
LCVMDDHPRHQV

SEQ ID NO: 30444 - protein, 19 aa, Homo sapiens
MKKPNTWKRVEIMNGVQEP

SEQ ID NO: 30445 - protein, 89 aa, Homo sapiens
LSPPPPAAPLPAASPPPSPSAPELGDFHCRGVVVHLAGAAPRAPLSPPLPVPVCPSPSSPSFAPCPDAVALPHTEIQPFIFWAKPNPPV

SEQ ID NO: 30446 - protein, 86 aa, Homo sapiens
MFFPTRGGSDHVSSMEAFKSRPAEAASLSELGRHNPHRSAWSTELHTHGASGRWAAAGLSSEAGSCSVTQSGMQWCHHSSLQPELY

SEQ ID NO: 30447 - protein, 70 aa, Homo sapiens
MFFPTRGGSDHVSSMEAFKSRPAEAASLSELGRHNPHRSAWSTELHTHGASGRWAAAGLSSEADRISLCC

SEQ ID NO: 30448 - protein, 44 aa, Homo sapiens
VDLMLYLGIFLLYLLKKNTIRRIRMYHKKSDAKHVNVIGKFYRV

SEQ ID NO: 30449 - protein, 38 aa, Homo sapiens
MFTIHTCGRQCHLERRLRYGERGAWSYSILLWCHPPCP

SEQ ID NO: 30450 - protein, 50 aa, Homo sapiens
LRIRTSDIKMSQCSRISQRLRWRESSTSQAQLCASLGPHRPHHLTAGNEI

SEQ ID NO: 30451 - protein, 90 aa, Homo sapiens
LPLSLPHSLFALLSWDDAARRPLPDASNLILNFSSSRMVMATVAEPRKPRRNQRMETHGSNGKSSDPGFPKEHWSRKMLCEKVFPGRRNL

SEQ ID NO: 30452 - protein, 65 aa, Homo sapiens
LMPLSTQMAETNQVMATVAEPRKPRRNQRMETHGSNGKSSDPGFPKEHWSRKMLCEKVFPGRRNL

SEQ ID NO: 30453 - protein, 67 aa, Homo sapiens
LAMVTPIGKLIAAFKVMATVAEPRKPRRNQRMETHGSNGKSSDPGFPKEHWSRKMLCEKVFPGRRNL

SEQ ID NO: 30454 - protein, 78 aa, Homo sapiens
LGMASSTPPSTKNLLPHTPSRNCSIQVMATVAEPRKPRRNQRMETHGSNGKSSDPGFPKEHWSRKMLCEKVFPGRRNL

SEQ ID NO: 30455 - protein, 258 aa, Homo sapiens
LHSTTPPGGTAGLRNCTVEMPIPKDLATMAFCDTHSTQEIHEKILHEALGAMRYHTITLARADLEKFKALGVIVRIGSGYDNVNIKAACELEIAVCNIPSAAVEETANSTICHILSLYRRNTWLCQAWPEGTCVTAWGRSERWPWEGLTSVGRRRGLIGFGSTGQAVPVRAEAFGFSVIFYDPYLQDGIERSLGVQRVYTLQDLLCQSDCISLHCKLNKHNHHHINDYDYKLDESGSIPCERSPWCPGGRESLSTGPQ

SEQ ID NO: 30456 - protein, 123 aa, Homo sapiens
LKVSSSLGNSAFNSWYSGLHACLVKPMRFIQLKIQMANDQQIQIYGGLTFRELLYVACFNTDPPRALLPSFRGGFLMAVLQGLPEMQWCLRSTKKAGNLWYEARPPRRASGNRMIRPLNDSNF

SEQ ID NO: 30457 - protein, 262 aa, Homo sapiens
LGAVGWELGREVPLAPVAFPLGRMAHAGRTGYDNREIVMKYIHYKLSQRGYEWDAGDVGAAPPGAAPAPGIFSSQPGHTPHPAASRDPVARTSPLQTPAAPGAAAGPALSPVPPVVHLTLRQAGDDFSRRYRRDFAEMSSQLHLTPFTARGRFATVVEELFRDGVNWGRIVAFFEFGGVMCVESVNREMSPLVDNIALWMTEYLNRHLHTWIQDNGGWDAFVELYGPSMRPLFDFSWLSLKTLLSLALVGACITLGAYLGHK

SEQ ID NO: 30458 - protein, 74 aa, Homo sapiens
LLVVEIQRSSVCNPVGCGGKWYPFSVSQAEGPGVPRTTVSWLEQLVGTGGRFQGLLMNQIPGWVLTVCIPNKLP

SEQ ID NO: 30459 - protein, 228 aa, Homo sapiens
LGAVGWELGREVPLAPVAFPLGRMAHAGRTGYDNREIVMKYIHYKLSQRGYEWDAGDVGAAPPGAAPAPGIFSSQPGHTPHPAASRDPVARTSPLQTPAAPGAAAGPALSPVPPVVHLTLRQAGDDFSRRYRRDFAEMSSQLHLTPFTARGRFATVVEELFRDGVNWGRIVAFFEFGGVMCVESVNREMSPLVDNIALWMTEYLNRHLHTWIQDNGGWVGALGDVSLG

SEQ ID NO: 30460 - protein, 19 aa, Homo sapiens
LKTPPRPRMQSTSNKIAGL

SEQ ID NO: 30461 - protein, 30 aa, Homo sapiens
LHLMPRGKHQNQVFRVIEDTPSSKNAKHIQ

SEQ ID NO: 30462 - protein, 46 aa, Homo sapiens
METFEIFYLKCIRVNLISRQLNTFFLAVLLVVCMPCFHSVCTGKRT

SEQ ID NO: 30463 - protein, 18 aa, Homo sapiens
LGIDLEILLIFTPSPRDS

SEQ ID NO: 30464 - protein, 27 aa, Homo sapiens
MPVPARVCARVNCREGENITGLLRIPD

SEQ ID NO: 30465 - protein, 7 aa, Homo sapiens
MHLLFGV

SEQ ID NO: 30466 - protein, 35 aa, Homo sapiens
VRSPEAGCAGGVQRKRGSRGENFVAVILFRKRGKK

SEQ ID NO: 30467 - protein, 241 aa, Homo sapiens
LRLSCPGEPEGPLAVSRRSGPPAPEAGAGSPRTAEWAVIGGGARAGRARAGVEPVPPVCPARGAARTGSPRARGRPAAERTFFRMHTPGSLASDAVGRAARPQVLTTPFFGEGYSAVVTSSNPTLYRLLSLDSQLTPCRRQELLSQLELCLFSCQGFFLTQEKERKKKDEVGQSGVLPFSAANSSFPVFFWDESSRTLKVQIKALFPIREVPDQAQLGVESVLCAGGIHGFRPPLCRKASL

SEQ ID NO: 30468 - protein, 522 aa, Homo sapiens
METDLAEMPEKGVLSSQDSPHFQEKSTEEGEVAALRLTARSQAAAAAAAPGSRSLRGVHVPPPLHPAPAREEIKSTCSLKACFSLSLTLTYYRTAFLLSTENEGNLHFQCPSDVETRPQSKDSTSVQDFSKAESCKVAIIDRLTRNSVYDSNLEAALECENWLEKQQGNQERHLREMFTHMNSLSEETDHEHDVYWKSFNQKSVLITEDRVPKGSYAFHTLEKSLKQKSNLMKKQRTYKEKKPHKCNDCGELFTCHSVHIQHQRVHTGEKPYTCNECGKSFSHRANLTKHQRTHTRILFECRECKKTFTESSSLATHQRIHVGERPYECNECGKGFNRSTHLVQHQLIHTGVRPYECNECDKAFIHSSALIKHQRTHTGEKPYKCQECGKAFSHCSSLTKHQRVHTGEKPYECSECGKTFSQSTHLVQHQRIHTGEKPYECSECGKTFSQSSNFAKHQRIHIGKKPYKCSECGKAFIHSSALIQHQRTHTGEKPFRCNECGKSFKCSSSLIRHQRVHTEEQP

SEQ ID NO: 30469 - protein, 71 aa, Homo sapiens
LCRNEVRPGARGREASALWLRPRLLPGIRSRAGELRGSLLRAGLLHHLPRVAKAEKKEKNGSGEYKRLIFF

SEQ ID NO: 30470 - protein, 85 aa, Homo sapiens
LTVGRTRMWDRQPRALVGPDLPAGRVGAVAPAGVAEMGHGHWGLHQPLWGVSGWAVGVGLGRCLCSAGTARVDLAPRVLDVFRMT

SEQ ID NO: 30471 - protein, 197 aa, Homo sapiens
LHCVLTTILSQTENKVPVPQGYPGGVPTFFRDMKQGLLSVGIGGRESRNGCLDVEKDCSITKFLNRILGLEVHKQNALFQYFSDTFDHLIEMDKREGKYDMGILDLAPGIEEIYEESQQVFLAPGHPQDGQVVFYKISVDRGLKWEDAFAKSLALTGPYDGFYLSYKVGSGGVTPPEEGPRGADRGAASTPPSAGPR

SEQ ID NO: 30472 - protein, 42 aa, Homo sapiens
LCPQFLLSGSASRDLTWGVSAILWQHIDSDEPTRPQPILRKR

SEQ ID NO: 30473 - protein, 181 aa, Homo sapiens
MDFQHRPGGKTGSGGVASSSESNRDRRERLRQLALETIDINKDPYFMKNHLGSYECKLCLTLHNNEGSYLAHTQGKKHQTNLARRAAKEAKEAPAQPAPEKVKVEVKKFVKIGRPGYKGESARSGAGHSRCRDISVFFSLQCGRCSPDSLLPEPLFSGLGGRPSPTCSLWRCVWELSGWAR

SEQ ID NO: 30474 - protein, 375 aa, Homo sapiens
LAWSLAPALFWSEDGGTAGQGPALGLLPHQALDWGSGPCGGGGWGSKGLGTSSASQAGLGGLRDFGFLHASHLLSFWNIPPALLSSGHQGPGSTGQRVWKVRAGPVRTGSRGGAGGQQLPTLSSTGEGRAHSSFLGRVSGGSCWTQVNQVNQGSCWKLGHGPHPHGLGDCLCLPSLAAPLPWLWATWQSLDRGCRVGGALPGPSNSAQRCLRDSCRLCPHLPSKTSGCSPSLQSQCSDVFSRDCEFLRSPPRALGASLPSLSPPRRTLVSRTCDPASRGLWVARHPPRPHLHLDRTPRAVPSASAPPVPFPPSPGQCGCGHCHGACFAPYARLALLHAPASVSFQLWGLRGESCLCRAGRHSLWPGGLCQRGGNP

SEQ ID NO: 30475 - protein, 264 aa, Homo sapiens
LGVYILHLFFFLFSKALFWFLRLRCSRALSRHSSVEVPVPHLWFWPLRLGDYLFPTPGSSRPSHGVMRSWGPVCPRPGECLSGKRSLDLEGSPGSPDSRLHLSRGSPSSGTRRKLLPAVGHPFPSHRCPCPQDSPGPGASVRGRGGPSPNLGGRAQGLVPEQAVSQARSTLEWTPVPTRAWSMAKSQLAPPTWEAEEEVPWAQGLFGTSEEISQSHSRRVKRRPPAAVPSTPLGRQSPGPQPPASLSPGRTRGPPERPSHTSLL

SEQ ID NO: 30476 - protein, 366 aa, Homo sapiens
LGPAPTARRAVRRRCPSLSEQRIDGWGASPASRMVQNTPSAHPGPQKALPVCLRRPPCRPSAGSSPARAALGSVLYSSLYYICVCTVWSRAVSMCVSVAAVHVGWVGGAYGGACRLRCLCGGVGLEAEPGTAAGPLQAHGGILPLPFQGCRRLLPGLPGGSANTTKGSESSGRPGATSLLSGSTQTSANSLRGQTRISRPGARPPPIGSSSSLSFKSSNFEKNMSFCQIRRDSLWSFLRRIELWSAPRAWARPSAGPVGWPGWPSQAAFLSGRGLARPGLHRRNSCWCRARSPTPGMPEILQGPSRSSFPAHSSRARTLPRSQPIVAGGPRGWRPAWLASVSQTLTRGASSPLNPLTFKSFQVLVP

SEQ ID NO: 30477 - protein, 99 aa, Homo sapiens
LKTKRLRKKFAQKMLRKARRKLIYEKLKHYHKEYRQRYRTEIRMEKMSRKAGNFYEPAESRLAFVIRIRGIDGVSPKVRNVLQLLCLCQIFNGTFVKAN

SEQ ID NO: 30478 - protein, 245 aa, Homo sapiens
LNASFFSKRKGMQEVKLNSYVVSGTVGLKEKISLSEPVFLTFRHNQPGDKRTKHICVYWEGSEGGRWSTEGCSHVHSNGSYTKCKCFHLSSFAVLVALAPKEDPVLTVITQVGLTISLLCLFLAILTFLLCRPIQNTSTSLHLELSLCLFLAHLLFLTGINRTEPEVLCSIIAGLLHFLYLACFTWMLLEGLHLFLTVRNLKVANYTSTGRFKKRFMYPVGYGIPAVIIAVSAIVGPQNYGTFTQ

SEQ ID NO: 30479 - protein, 381 aa, Homo sapiens
MGYKWQDEATVDGNSENCGEVFSEWFCLKTHMRAQNGGNIFEGNCYGKDILSVHKEASIGQELSKFNPCGKVFTLTPDLAAHLGILNARQPYKCKECRKGFKYFASLDNHMGIHIGEKFCEFQECRRAITHSSHLKQCVTVHTGKKSKKTKKHGKSFTNFSQLSAHVKIHKGEKSFECKECGRSFRNSSSFNVHIQIHTGIKPHKYTECGKAFTRSTHLTQHVRTHTGIKPYECKECGQAFTQYTGLAIHIRNHTGEKHYQCKECGKAFNGSSTLTQHKIIHTGEKPYGCVECGKTFITSSYRSKHLKTHHEERPFVCKICGKAFLYSSPLNVHLQTHTREKALICKECGKAFAVSSHLSRHERIHTGEEPYEYKGMNVTI

SEQ ID NO: 30480 - protein, 39 aa, Homo sapiens [sequence omitted]

SEQ ID NO: 30481 - protein, 248 aa, Homo sapiens
MPVLGMEAMGTEATRRQQATVTFSQTATAIMILGLPRASKSQFYSNGGHSGNASGGGGGGGGGSSGYGSYYQGDNYNSPVPPKHAGKKQPHGGQQKPSYGSGYQSHQGQQQSYNQSPYSNYGPPQGKQKGYNHGQGSYSYSNSYNSPGGGGGSDYNYESKFNYSGSGGRSGGNSYGSGGASYNPGSHGGYGGGSGGGSSYQGKQGGYSQSNYNSPGSGQNYSGPPSSYQSSQGGYGRNADHSMNYQYR

SEQ ID NO: 30482 - protein, 45 aa, Homo sapiens
LAQECVTPEMGPRISLHFLLSVGYWTRASAPILFSRISMSFNFTF

SEQ ID NO: 30483 - protein, 444 aa, Homo sapiens
MIFEDVAVNFTQEEWALLDPSQKKLYRDVMWEIIRNLMSVGIKWEDRNIEDQYKNSRRNPRNHMAERLCECKDGQCGETFSLIPDGIMNKNTLPGVKPCESSVCGEGNVDHSSLNCYIRADTGHKPYECQEHGEKPHKCKQCVKTFSCLHSFQTHEKPHTGEKPYDCKEWEKTFDSPQTVRRYRVVHSGDGPYKCKFCGKAFDNLSLYLTHERSHTGQKPYECNECGKAFGFPSSFHRHERMHTGEKPYECKQCGKTFSCSSSIKKHERIHTGEKPYECKQCGKAFASSNSFQYHERTHTGEKPYECKQCGKAFNCSSSLRKHARIHTGEKPYICKQCGKAFRFPSSIKNHEKTHTGEKPYECQECGKAFRYSSSLRVHKRIHTGEKPYECEDCGKAFSHPTTFHRHKITHTAEKPYECQECGEAFRYPVAFRRHKITHTAEKL

SEQ ID NO: 30484 - protein, 647 aa, Homo sapiens
LALALRERRPGRSVSASVALGPTLAFKEDTRTPGSWEMDSVAFEDVAVNFTQEEWALLGPSQKSLYRNVMQETIRNLDCIEMKWEDQNIGDQCQNAKRNLRSHTCEIKDDSQCGETFGQIPDSIVNKNTPRVNPCDSGECGEVVLGHSSLNCNIRVDTGHKSCEHQEYGEKPYTHKQRGKAISHQHSFQTHERPPTGKKPFDCKECAKTFSSLGNLRRHMAAHHGDGPYKCKLCGKAFVWPSLFHLHERTHTGEKPYECKQCSKAFPFYSSYLRHERIHTGEKAYECKQCSKAFPDYSTYLRHERTHTGEKPYKCTQCGKAFSCYYYTRLHERTHTGEQPYACKQCGKTFYHHTSFRRHMIRHTGDGPHKCKICGKGFDCPSSVRNHETTHTGEKPYECKQCGKVLSHSSSFRSHMITHTGDGPQKCKICGKAFGCPSLFQRHERTHTGEKPYQCKQCGKAFSLAGSLRRHEATHTGVKPYKCQCGKAFSDLSSFQNHETTHTGEKPYECKECGKAFSCFKYLSQHKRTHTVEKPYECKTCRKAFSHFSNLKVHERIHSGEKPYECKECGKAFSWLTCLLRHERIHTGEKPYECLQCGKAFTRSRFLRGHEKTHTGEKLYECKECGKALSSLRSLHRHKRTHWKDTL

SEQ ID NO: 30485 - protein, 104 aa, Homo sapiens
LALALRERRPGRSVSASVALGPTLAFKEDTRTPGSWEMDSVAFEDVAVNFTQEEWALLGPSQKSLYRNVMQETIRNLDCIEVIHVKLKMTVNVEKLLARFQIVL

SEQ ID NO: 30486 - protein, 39 aa, Homo sapiens
LALALRERRPGRSVSASVALGPTLAFKEDTRTPGSWEMK

SEQ ID NO: 30487 - protein, 20 aa, Homo sapiens
VTPTTSAGHSTGDRSYGRGT

SEQ ID NO: 30488 - protein, 84 aa, Homo sapiens
LSVALCSSLVTRALGKTVGSSDMDSVAFEDVAVNFTPDEWALLDPSQKNLYREVMQETLRNLASIEVLWKRDSLKVKVISMEKF

SEQ ID NO: 30489 - protein, 104 aa, Homo sapiens
LSVALCSSLVTRALGKTVGSSDMRNMIPQDNENPPQQGEANQNDSVAFEDVAVNFTPDEWALLDPSQKNLYREVMQETLRNLASIEVLWKRDSLKVKVISMEKF

SEQ ID NO: 30490 - protein, 49 aa, Homo sapiens
LRLGSGLRFSSGPGGSTAASGALGPAQAGESRRQDPGTPWKPGNGLSGL

SEQ ID NO: 30491 - protein, 122 aa, Homo sapiens [sequence omitted]

SEQ ID NO: 30492 - protein, 55 aa, Homo sapiens
LAGGWGHHAHPTNGEVGGTSGGQGPLGSNRVISGSPLGPATWEGGITQLTESGFG

SEQ ID NO: 30493 - protein, 147 aa, Homo sapiens
LDGWAHASHWGPGSRRWAPTLGPRGAANHTGLRPSYPAPSPSTSTFTSPPFHFFLYVFFLLETDSIHIEYNIFVYLTGRGRGGDRGGAGPAAWYSSPRGHWEGDPRPLPSPLCTVLWKRNTHLVSKEFILRRVCVCVCLFFLLNLFK

SEQ ID NO: 30494 - protein, 88 aa, Homo sapiens [sequence omitted]

SEQ ID NO: 30495 - protein, 63 aa, Homo sapiens
LKQGVLTHGRVHLLLSKGHSYYRPRRTGERKRRSVHGCIVDANLSVLNLVIVKKRREGYSWTD

SEQ ID NO: 30496 - protein, 399 aa, Homo sapiens
LALICTGPASSGRCAARGEREETGPPGAGRRRAGPGAAHFPWGGPTRRPRLSWPSEAHEEARPNAGAWSIEAGPSRDSRAWPDAGNHTLAQTASPDGTEPGHSPGCKNSAGVSTPTSGSMCPPQAQAEVGPTMTEKAEMVCAPSPAPAPPPKPASPGPPQVEEVGHRGGSSPPRLPPGVPVISLGHSRPPGVAMPTTELGTLRPPLLQLSTLGTAPPTLALHYHPHPFLNSVYIGPAGPFSIFPSSRLKRRPSHCELDLAEGHQPQKVARRVFTNSRERWRQQNVNGAFAELRKLLPTHPPDRKLSKNEVLRLAMKYIGFLVRLLRDQAAALAAGPTPPGPRKRPVHRVPDDGARRGSGRRAEAAARSQPAPPADPDGSPGGAARPIKMEQTALSPEVR

SEQ ID NO: 30497 - protein, 29 aa, Homo sapiens
LGGTYAETSAILAFRGPRGGAAQRRGLEH

SEQ ID NO: 30498 - protein, 144 aa, Homo sapiens
LERRRVAEGRAEIFYLLCLCIAGFPAPNLTPPPRTRRRNSAPLFGGRQPRVHGDCRARRVRSRASSEPTRGAPVAGNCGGMAWYESREPVARGGSPPTSKGWRTLETEELEAPVAPFHSSSKYCLFSKYWPSDSALVSPLEGSR

SEQ ID NO: 30499 - protein, 114 aa, Homo sapiens [sequence omitted]

SEQ ID NO: 30500 - protein, 118 aa, Homo sapiens
LCLPATTAHSPASSAACRTMAQGQRKFQAHKPAKSKTAAAASEKNRGPRKGGRVIAPKKARVVQQQKLKKNLEVGIRKKIEHDVVMKASSSLPKKLALLKAPAKKKGAAAATSSKTPS

SEQ ID NO: 30501 - protein, 22 aa, Homo sapiens
LDNESHHLSTMHLVTPSSADNR

SEQ ID NO: 30502 - protein, 110 aa, Homo sapiens
VVFYTDMLDTWCQNLGQGDSFVRPAPCPGPHSVKRSTCDLGSSDQPKEHLTNFKSGKWSLHSFLQPLSLPSNLPVQSFSSLVETKETHFIRGPKTLALVTDSGRQSSLGV

SEQ ID NO: 30503 - protein, 64 aa, Homo sapiens
VVFYTDMLDTWCQNLGQGDSFVRPAPCPGPHSVKRSTCDLGSSDQPKEHLTNFKSDLLGLVAED

SEQ ID NO: 30504 - protein, 94 aa, Homo sapiens
LISPLPPGSHKIRPRADQTNNLQPLSSWQRPAKAMLPCNTPSKWPSQHASKQASSVPLDPHLLRPAAYKKDYILRPYPLKFFPHPKQKISGSKV

SEQ ID NO: 30505 - protein, 27 aa, Homo sapiens
MMENGDKRLWYIKHYSFLGLKTHRHLH

SEQ ID NO: 30506 - protein, 60 aa, Homo sapiens
LVHKTLFLPWPKNSSPPTLKLICLITVFRELILLGQFQAQKYANWHLVSYIKMHPRPETY

SEQ ID NO: 30507 - protein, 31 aa, Homo sapiens
VSSIRTRVTGTSTQRQSDEVSKIKVAAQRLL

SEQ ID NO: 30508 - protein, 82 aa, Homo sapiens
MAKTYDYLFKLLLIGDSGVGKTCVLFRFSEDAFNSTFISTIEVETESWGIGHGKKTVASHLNEHLLCAKCFTCIFTLFSSWC

SEQ ID NO: 30509 - protein, 98 aa, Homo sapiens
MLPGLVRDRGCWLQLGPPPLHLAGLAPGSLGGATLDIATWGSPVSITHTPVLPRAGWQAALVGLRGQGQPSWFISTGAICSSASAPEAGAQGPARQEA

SEQ ID NO: 30510 - protein, 178 aa, Homo sapiens
LKNLKHRFLQQKIYTYAGSILVAINPFKFLPIYNPKYVKMYENQQLGKLEPHVFALADVAYYTMLRKRVNQCIVISGESGSGKTQSTNFLIHCLTALSQKGYASGVERTILGAGPVLEVLRSQLVRMQLPLGKRVCYSQFPKEEDAMPWKATGGSTGTHQEAEGEREKGSGERQETLL

SEQ ID NO: 30511 - protein, 191 aa, Homo sapiens
VSWAPRTWRGCGPGDPPSPSVPRNSERARPPGIPPPRGCPGLDKLDPLLPGGRAHDPPALALPLSPARPPRVAQTRASRLPLCTPRRGRGLRGGAASNPAFPLLLLFFFFLWKREEQSVRFCPIYVSTREQTLVVCVCVFLCWFFKEMGRRKKNSPPLSSISLPPSVLSTGPPSLFCSVLFCFATSPHSCL

SEQ ID NO: 30512 - protein, 169 aa, Homo sapiens
VTQGVLTPPWPQFPHLKNGYRKGLSLRPQEALPPPPCPSCRSSAPSAPRGGRGETPNKGTGRSLCQSCHHPPVDVQAVLNKCFEADEAAGSGCVGSSRWGFLSSKTKSPSETPKLLPTSHPCFFLLLLFVCLFLKLSVTLSPRLECNAAVSAHCNLRLLGSSDSPASAS

SEQ ID NO: 30513 - protein, 200 aa, Homo sapiens
LHIREFILERSPTNVKNVAKTFKCTSNLTTHKRIHTGEKPYKCKECGKAFHLSSHLTTHKILHTGEKPYRCKECGKAFNHSTILFSHKKIHTGEKFYKCDECGKTFTWPSLLSKHRRTHTGEKPYKCEVCGKAFTASLTLTEHQRIHTGEKPYKCEECGKAFNWSSYLHKHKRIHIAQKPYIVKNVANILNIPPLLISIR

SEQ ID NO: 30514 - protein, 394 aa, Homo sapiens
MDSQSRKVVVCDNDTGFVKCGYAGSNFPEHIFPALVGRSIIRSTTKVGNIEIKDLMVGDEASELRSMLEVNYPMENGIVRNWDDTKHLWDYTFGPEKPNIDTRNCKILLTEPLMNPTKNREKMVEVMFETYQFSGVYVAIQAVLTLYARGLLTAVVVDSGDGVTHIYPVLEGFSLPHLTRRLDIAGRDITRYLIKLLLLQGYTFNHSADFETVRMIKEKLCYVGYNIVQEQKLALETTVLVESYTLPDGGIIKVGGERFETPEALFQPHLINVEGVGVAELLFNTIQAADIDTRSEFYKHIVLSGGSTMYPGLSSRLKRELKQLYLERVLKDDAEKLPKFKICIEDPSRRKHMVFLGGAVLADIMKDKDNFWMTRQEYQEKGVLVLEKLGVTVR

SEQ ID NO: 30515 - protein, 48 aa, Homo sapiens
MARPLSLAAAGAPDLLFTALCSLLIEAQPLRPFDLQVLGDPQPRARTP

SEQ ID NO: 30516 - protein, 48 aa, Homo sapiens
LFTQPVFLNLIRFVMCPNRIHKVQIRMLCILLLLTEKFCTCLLILVGL

SEQ ID NO: 30517 - protein, 247 aa, Homo sapiens
VILREYGNYGHKDLQLRKGCKSVNECNVQKEGYNELKEYLTTTQSKIFQCDKYVKVFHKFLNSNTHKTRHTGKKPFKCKKCGKSFCMLLHLGQHKIIHIRENSYQCEECGKAFKWFSTLTRHKRIHTGDKSYKHEECGKGFNHSTTLTRHKVIHAGEKHYKCEKCGKDFKQSSHLTKHKTIHAGEKPYKCEGCGKAFCQFSYLTKHKIIHTGEKPYKCEECGKAFNWYSHLTRHKIIHTGEKPYKCE

SEQ ID NO: 30518 - protein, 102 aa, Homo sapiens
LLGFFPQQIMRYPWLKSRGNCDISLGPVPSKCDCSIHHKSCFQGRLGHIVGLNTNVTLLFCLGPDLKGTVTYCSAQQQGDERSCVDIDNREHCDISLGASAI

SEQ ID NO: 30519 - protein, 210 aa, Homo sapiens
MEGVAVVTAGSVSAAKAEGAAALPPPPPVSPPALTLAPAAGEEGPAPLSETGAPGCSGSRPPELEPERSLGRFRGRFEDKDEQLEEEEELEEEEEEEEEEDMSHFSLRLEGGRQDSEDEEERLINLSELTPYILCSICKGYLIDATTITEYLYTFCKSCVVRHFYYSNRCPKCNIAVHQTQPLYKVGPTVTRHSVQISDQSRGKRKKANA

SEQ ID NO: 30520 - protein, 164 aa, Homo sapiens [sequence omitted]

SEQ ID NO: 30521 - protein, 119 aa, Homo sapiens
LERIPKNVKNVVNPSADSQSSKHKKIHTGEKIYKGEECGKAFKQSSIFITHKKIHAGEKHYKREECDKGFNRSSNLVEHKRIHTGEKPYKCEECDKDFNCSSHLTTHKRIHTGGKALQM

SEQ ID NO: 30522 - protein, 48 aa, Homo sapiens
LMEWQFLDTAQWNLYRNVMLENYRNLVFPGIAVSKPDLIICLEQKKEP

SEQ ID NO: 30523 - protein, 75 aa, Homo sapiens
VARPCRDPSTSGGLAGIEDEPLALGEPGRLVGNGACLWEGHPSRDRLECTGAQLGHSRGTMGVTAASDRLSFTAA

SEQ ID NO: 30524 - protein, 124 aa, Homo sapiens
LGAFPARKPDPAVLRGGERTRRRRQQEVGDRSRRGPKRNAAPRPLAPRTLRLPAPRCSPTDRTGFRLERAEAPGPSWVGGPLRRLRAPSRGSAAENRSRTGGARGLGCVRCARFKGQQEYLTLI

SEQ ID NO: 30525 - protein, 195 aa, Homo sapiens
VLRGGERTRRRRQQEVGDRSRRGPKRNAAPRPLAPRTLRLPAPRCSPTDRTGFRLERAEAPGPSWVGGPLRRLRAPSRGSAAENRSRTGGARGLGCVRCARSRPDGRLVWTMREERAPHTQEVTPEPAPDDPATWNNAAGLHVLFHPAVRSCRPPPLHQPAGPYGARPPAGARNKVQHQAKAAPPRPPTRRLPGW

SEQ ID NO: 30526 - protein, 23 aa, Homo sapiens
LGCTIPSALGLMYYIYLGPTVPQ

SEQ ID NO: 30527 - protein, 83 aa, Homo sapiens
MKMKSILRTAEMWTLRPGRLRGIITSEGEWSESTPPLPGQEVNREGLCGGCAHPASRLLSCCDGILELLKDTSSLCGKHLLED

SEQ ID NO: 30528 - protein, 9 aa, Homo sapiens
VESNLPGPA

SEQ ID NO: 30529 - protein, 13 aa, Homo sapiens
KSTCFAESLLFLY

SEQ ID NO: 30530 - protein, 30 aa, Homo sapiens
LPLPVSYELSRHPGTVAATVCVFPSLNSCR

SEQ ID NO: 30531 - protein, 33 aa, Homo sapiens
MATPVGVEHGEQSQAFSDDGAVSLSFQSRKRIL

SEQ ID NO: 30532 - protein, 44 aa, Homo sapiens
MEGCMDLDVWVPFLLPWQKLTHPSVSIQNGISSWAPSPESPASR

SEQ ID NO: 30533 - protein, 47 aa, Homo sapiens
MLPAQQVHQRARMNYGCHECPCEAVGKPWLDCEGYLKSILESTRSSM

SEQ ID NO: 30534 - protein, 47 aa, Homo sapiens
WLQLALSPLSCFVAGILAKTLSLPPYSSRVVIFFFHQEISLAGNLSN

SEQ ID NO: 30535 - protein, 57 aa, Homo sapiens
MFKQSLSMKLGGDRVSCQFLTATSHQWLHSVSLTQHMAQECLPSVSVSTAAIPRCWS

SEQ ID NO: 30536 - protein, 64 aa, Homo sapiens
MAWYESREPVARGGSPPTSKGWRTLETEELEAPVAPFHSSSKYCLFSKYWPSDSALVSPLEGSR

SEQ ID NO: 30537 - protein, 94 aa, Homo sapiens
MDKKSTHRNPEDARAGKYEGKHKRKKRRKQNQNQHRSRHRSVTSFSSDDPMFPSSSSSSSGSQTDSSIEDAAKGKIKKKRREKTNKWEKRKDKI

SEQ ID NO: 30538 - protein, 22 aa, Homo sapiens
NAFLCCLQHLIIYPGEFSCLPG

SEQ ID NO: 30539 - protein, 8 aa, Homo sapiens
MPRARNSC

SEQ ID NO: 30540 - protein, 30 aa, Homo sapiens
YVWLLVIAGLSADLCPVCPVAPGDVSSRRG

SEQ ID NO: 30541 - protein, 20 aa, Homo sapiens
MGSLQVPATRGGHGRRKAQS

SEQ ID NO: 30542 - protein, 34 aa, Homo sapiens
RSQSGRAYCHSNSFARCPGPGIVAEHPRPAEVPP

SEQ ID NO: 30543 - protein, 36 aa, Homo sapiens
MNWIDRGGGGFAFCPREWRFASWGRAGENRPRRKKE

SEQ ID NO: 30544 - protein, 38 aa, Homo sapiens
MDEKMLVLWVVALSGISTLFFAADHLVVCECTYRFGRE

SEQ ID NO: 30545 - protein, 42 aa, Homo sapiens
MFSPQELTGEGMGQDPSLCKASVTVMFQHLIIYPGEFSCLPG

SEQ ID NO: 30546 - protein, 25 aa, Homo sapiens
MPVWWRRRRLRARSWALRGARKPLR

SEQ ID NO: 30547 - protein, 57 aa, Homo sapiens
MKWTQHVKTILSRSLAVKENRECAKEHTDTEQTGHLCNHMEVCLILKLKKLSWKTER

SEQ ID NO: 30548 - protein, 63 aa, Homo sapiens
MEQGREWLRLPPRFGDAVRAASGALETSESLRVGWDSGPASHLPADWSAPRASVTQPASKTSL

SEQ ID NO: 30549 - protein, 66 aa, Homo sapiens
MSYWAPVCRIYAHVGTEESSVVAMFSPQELTGEGMGQDPSLCKASVTVMFQQHLIIYPGEFSCLPG

SEQ ID NO: 30550 - protein, 67 aa, Homo sapiens
MGARAAEEAPLVCPLVERALPALRGFQPGSFGKPGRLLTGDDTCVGCWHSCYLTREGGDFACDGLPV

SEQ ID NO: 30551 - protein, 6 aa, Homo sapiens
MDDLLG

SEQ ID NO: 30552 - protein, 9 aa, Homo sapiens
FPGARKPLR

SEQ ID NO: 30553 - protein, 10 aa, Homo sapiens
RRLTTTGTSH

SEQ ID NO: 30554 - protein, 14 aa, Homo sapiens
MVVDMCGHTGKDGG

SEQ ID NO: 30555 - protein, 14 aa, Homo sapiens
MRPACVNTPSEEWS

SEQ ID NO: 30556 - protein, 16 aa, Homo sapiens
MTVCLYLTEQLVAIYH

SEQ ID NO: 30557 - protein, 17 aa, Homo sapiens
MADPVLSQCSSGGKATS

SEQ ID NO: 30558 - protein, 23 aa, Homo sapiens
FFAKHSCYLTREGGDFACDGLPV

SEQ ID NO: 30559 - protein, 59 aa, Homo sapiens [sequence omitted]

SEQ ID NO: 30560 - protein, 25 aa, Homo sapiens
MADSVSKKNCGTYWHLGRCEATPLP

SEQ ID NO: 30561 - protein, 28 aa, Homo sapiens
MLNKNALPQLTYVFWLVPHNILSNGRTE

SEQ ID NO: 30562 - protein, 33 aa, Homo sapiens
EGQNNGLPDSQAPPRGSPQERLEAEEFTEATAS

SEQ ID NO: 30563 - protein, 35 aa, Homo sapiens
FRASLGALCSPGSSEELHLPCPCHRSCPVCFSCCC

SEQ ID NO: 30564 - protein, 35 aa, Homo sapiens
LLGQALLCPNNKPCTLGKVPRHELWSSLQSIWSIH

SEQ ID NO: 30565 - protein, 38 aa, Homo sapiens
MDCDAEGQNNGLPDSQAPPRGSPQERLEAEEFTEATAS

SEQ ID NO: 30566 - protein, 42 aa, Homo sapiens
MSRLGIILRHHLASPASHFKVITGSGLPLKGILMLTTSPRRA

SEQ ID NO: 30567 - protein, 52 aa, Homo sapiens
LFSKQKSEQRVVQLFVPPPCRSDLIHVNVVPATASARKRTLNRVVTPGLRLN

SEQ ID NO: 30568 - protein, 54 aa, Homo sapiens
MCHSVYILSMCFLLLLFVHLPRMKTPWEHGYSVLFTPASPGPETEVGRQSLKQK

SEQ ID NO: 30569 - protein, 56 aa, Homo sapiens
PKLKTRLFRRPSSTFCACFWRKSGQALLCPNNKPCTLGKVPRHELWSSLQSIWSIH

SEQ ID NO: 30570 - protein, 58 aa, Homo sapiens
MSSLGSHQNKETGLKTLIPESILPHIQNEIHAQRCQEESRQTGLSRLYKKHDASICFW

SEQ ID NO: 30571 - protein, 58 aa, Homo sapiens
MLNKNALPQLTYVFWLVPHNILSNGASLGALCSPGSSEELHLPCPCHRSCPVCFSCCC

SEQ ID NO: 30572 - protein, 74 aa, Homo sapiens [sequence omitted]

SEQ ID NO: 30573 - protein, 79 aa, Homo sapiens
MFCSEQGLKNMIFSTVDCSLVFRTLPPAEKIDEGNTGGGIRAVSCLGWLKTNLEEHDVTTSTEIKRRHQSEGPVGTVEQ

SEQ ID NO: 30574 - protein, 92 aa, Homo sapiens
MAGLFVFAVCFSCWVLPQGQYGRRCHMYIMAFVTWTSWRACRIVKDGGFCRLVPRRAGEKVGWTVLDCCITQPIRNGGGIDHSQLEQKMELD

SEQ ID NO: 30575 - protein, 101 aa, Homo sapiens
MAPLPSPALGFFELHFFFKAAPSSTPSELDFFLPSLRNSSGEPPPPPAQPYLPPALPSPPALHLPSSNVLFSFFKRLDSSDFAELQTSSLRRTPPHPHSSH

SEQ ID NO: 30576 - protein, 126 aa, Homo sapiens
MRPQPRGGSGRKENTGREAEEHVMETDRVEGARDGDKRKEVCFVPIQGSFCFMRLTCARLVAALDIHGLSFSLRFCGSRDTKHEDITGREGQVTPLPRGTPQLCTARVGLSSPRTRGQGVPISCKT

SEQ ID NO: 30577 - protein, 6 aa, Homo sapiens
MVIPDS

SEQ ID NO: 30578 - protein, 6 aa, Homo sapiens
MSNVTD

SEQ ID NO: 30579 - protein, 6 aa, Homo sapiens
MTLQLS

SEQ ID NO: 30580 - protein, 7 aa, Homo sapiens
MLELEGT

SEQ ID NO: 30581 - protein, 7 aa, Homo sapiens
MTAAPCV

SEQ ID NO: 30582 - protein, 7 aa, Homo sapiens
MFKQSCE

SEQ ID NO: 30583 - protein, 7 aa, Homo sapiens
VAVDECS

SEQ ID NO: 30584 - protein, 8 aa, Homo sapiens
RLWNLAFS

SEQ ID NO: 30585 - protein, 8 aa, Homo sapiens
MSHKPPRL

SEQ ID NO: 30586 - protein, 8 aa, Homo sapiens
MWPTNSTP

SEQ ID NO: 30587 - protein, 8 aa, Homo sapiens
MSCCWYFN

SEQ ID NO: 30588 - protein, 8 aa, Homo sapiens
NNLEKIEV

SEQ ID NO: 30589 - protein, 9 aa, Homo sapiens
MRNVDYTPL

SEQ ID NO: 30590 - protein, 26 aa, Homo sapiens
MEKDRCTLLGLEKKTKMSKRDAPSVL

SEQ ID NO: 30591 - protein, 9 aa, Homo sapiens
CHEVYLTVV

SEQ ID NO: 30592 - protein, 9 aa, Homo sapiens
GCLRRPEPI

SEQ ID NO: 30593 - protein, 10 aa, Homo sapiens
EKSPGASAIW

SEQ ID NO: 30594 - protein, 10 aa, Homo sapiens
MDFQCEHWPE

SEQ ID NO: 30595 - protein, 10 aa, Homo sapiens
KVGSRRKKTS

SEQ ID NO: 30596 - protein, 10 aa, Homo sapiens
MVESNLPGPA

SEQ ID NO: 30597 - protein, 10 aa, Homo sapiens
YNEKNRSNKT

SEQ ID NO: 30598 - protein, 11 aa, Homo sapiens
MIGAKFVILIH

SEQ ID NO: 30599 - protein, 11 aa, Homo sapiens
MEVSSFGKSFI

SEQ ID NO: 30600 - protein, 12 aa, Homo sapiens
MESHGTRRLKQC

SEQ ID NO: 30601 - protein, 11 aa, Homo sapiens
MVGSTLTIGGN

SEQ ID NO: 30602 - protein, 12 aa, Homo sapiens
MHLVTPSSADNR

SEQ ID NO: 30603 - protein, 12 aa, Homo sapiens
DHAACIEVPKFN

SEQ ID NO: 30604 - protein, 12 aa, Homo sapiens
MDSAGLLHNPTN

SEQ ID NO: 30605 - protein, 12 aa, Homo sapiens
KKIERKDYRAPN

SEQ ID NO: 30606 - protein, 13 aa, Homo sapiens
VQPEAKVLTTEGR

SEQ ID NO: 30607 - protein, 13 aa, Homo sapiens
MLLKAHGHDCTPH

SEQ ID NO: 30608 - protein, 14 aa, Homo sapiens
EVICVASCHCRIVS

SEQ ID NO: 30609 - protein, 14 aa, Homo sapiens
KVKAISLEAEDRPP

SEQ ID NO: 30610 - protein, 14 aa, Homo sapiens
LNTIWEHKGDLKVG

SEQ ID NO: 30611 - protein, 14 aa, Homo sapiens
MPGSPGDTKPALGN

SEQ ID NO: 30612 - protein, 14 aa, Homo sapiens
FPSPLNPQHSGPSG

SEQ ID NO: 30613 - protein, 15 aa, Homo sapiens
SGKLEDRSTGRRRKE

SEQ ID NO: 30614 - protein, 16 aa, Homo sapiens
MPRWGEGAHVPTAAVA

SEQ ID NO: 30615 - protein, 17 aa, Homo sapiens
QAAWLGNHTEEASRRCA

SEQ ID NO: 30616 - protein, 13 aa, Homo sapiens
MESRLDYTVWSKF

SEQ ID NO: 30617 - protein, 18 aa, Homo sapiens
MDRRGGGRGGGGGGGRPG

SEQ ID NO: 30618 - protein, 18 aa, Homo sapiens
GGRRSLRKPQISFFLFER

SEQ ID NO: 30619 - protein, 18 aa, Homo sapiens
MVVCGSLLEFFSGDLIII

SEQ ID NO: 30620 - protein, 18 aa, Homo sapiens
FCRKTRCLCSLQAEVTGE

SEQ ID NO: 30621 - protein, 19 aa, Homo sapiens
MRLRFNNDRMKTTIKETST

SEQ ID NO: 30622 - protein, 19 aa, Homo sapiens
PERRYLQWLPGCSLEPVQG

SEQ ID NO: 30623 - protein, 24 aa, Homo sapiens
SSTAILGPTCCLTIPEPRWEPWLR

SEQ ID NO: 30624 - protein, 19 aa, Homo sapiens
MTKKRRVEKISVKVSEAKL

SEQ ID NO: 30625 - protein, 19 aa, Homo sapiens
GRSVRLADLGQQAEVVPGC

SEQ ID NO: 30626 - protein, 19 aa, Homo sapiens
PERRYLQWLPGCSLEPVQG

SEQ ID NO: 30627 - protein, 20 aa, Homo sapiens
GCQVGPNRLFLCSFQHGREV

SEQ ID NO: 30628 - protein, 20 aa, Homo sapiens
MDGLQPGTFSGEGSTHPSST

SEQ ID NO: 30629 - protein, 21 aa, Homo sapiens
FLHAGTLSRHTYAKGQRSQTQ

SEQ ID NO: 30630 - protein, 21 aa, Homo sapiens
KYCQEFQIENEKQAKTSIGEV

SEQ ID NO: 30631 - protein, 22 aa, Homo sapiens
MACCGTSPCDHVHEGNTHPSQG

SEQ ID NO: 30632 - protein, 22 aa, Homo sapiens
SCTDLASPATYQVGSVWLSVFS

SEQ ID NO: 30633 - protein, 23 aa, Homo sapiens
QSASILQSSLLLYTIEKPSELRG

SEQ ID NO: 30634 - protein, 23 aa, Homo sapiens
MRPRRAGQGAPAAHPRGGGPERP

SEQ ID NO: 30635 - protein, 23 aa, Homo sapiens
SFPDATLKSVTRNIPNKQQSSRN

SEQ ID NO: 30636 - protein, 23 aa, Homo sapiens
GDGLKVEELTVTATPLQDAPGQE

SEQ ID NO: 30637 - protein, 23 aa, Homo sapiens
MCPCGHTVLLSEAVGFSLRDKKK

SEQ ID NO: 30638 - protein, 23 aa, Homo sapiens
MMFSILMEVLICIPAPGNVFIHG

SEQ ID NO: 30639 - protein, 24 aa, Homo sapiens
LTQAWTCPWEECVCDTDTVPCGKT

SEQ ID NO: 30640 - protein, 24 aa, Homo sapiens
MQRYTKKLPEHLGEYLMENRLVKT

SEQ ID NO: 30641 - protein, 26 aa, Homo sapiens
MILRPPQPCATACLLLWAQCLPRSME

SEQ ID NO: 30642 - protein, 26 aa, Homo sapiens
VLLTNNLLGSKGQHLLSKAQEEFEEN

SEQ ID NO: 30643 - protein, 27 aa, Homo sapiens
QSASILQSSLLLYTIEKPSELRGTTNQ

SEQ ID NO: 30644 - protein, 27 aa, Homo sapiens
QLTQVLHRSGFSESRKTAADRIPGTSV

SEQ ID NO: 30645 - protein, 62 aa, Homo sapiens
MAETRKLRDGATAPLLPACVRKVSLRGAPAPASGGEGGTCRGRSSEALGPLCSPAIARAALT

SEQ ID NO: 30646 - protein, 28 aa, Homo sapiens
MRNACFHIVNCLGTNYHYQGDKLLLRGC

SEQ ID NO: 30647 - protein, 28 aa, Homo sapiens
MMAACFHIVNCLGTNYHYQGDKLLLRGC

SEQ ID NO: 30648 - protein, 98 aa, Homo sapiens
MQVPLTPLWELGLGRVVENADALAIAIVLNNQWSLVPNRGILYFLPVSMKLGGDRVSCQFLTATSHQWLHSVSLTQHMAQECLPSVSVSTAAIPRCWS

SEQ ID NO: 30649 - protein, 29 aa, Homo sapiens
MAMAGRDLRARWNRRELCCCNVQPTRAYW

SEQ ID NO: 30650 - protein, 29 aa, Homo sapiens
MKVIITDVFQKLVEGCEKTTRITRHVLSI

SEQ ID NO: 30651 - protein, 29 aa, Homo sapiens
TESWKLKWWSPTCLDQLNGSAPGNVFIHG

SEQ ID NO: 30652 - protein, 29 aa, Homo sapiens
MLIGQRMCCGHKTKLWRTEDSFQGSACIQ

SEQ ID NO: 30653 - protein, 29 aa, Homo sapiens
MCSLLCCILSSLTTVPSTQRALPVYLLSK

SEQ ID NO: 30654 - protein, 29 aa, Homo sapiens
CFIFFFLIFPYSSHTRGPNCTSSFSENTC

SEQ ID NO: 30655 - protein, 30 aa, Homo sapiens
SYRSEQIRCIKNGICLGGHQKVNFPSSWTT

SEQ ID NO: 30656 - protein, 31 aa, Homo sapiens
MFTRPEMPRPRPGREKAEMEDRRLPYKLVGA

SEQ ID NO: 30657 - protein, 31 aa, Homo sapiens
MATPVGVEHGEQSQAFSDDGKAAWVGKRGLP

SEQ ID NO: 30658 - protein, 31 aa, Homo sapiens
ASNDFCPFKAHYVTFSPKVSTENEKYPPTIG

SEQ ID NO: 30659 - protein, 6 aa, Homo sapiens
MNVECD

SEQ ID NO: 30660 - protein, 33 aa, Homo sapiens
LRAPAPERCPVPGEQRDLKEQVPLPQTSAVTSQ

SEQ ID NO: 30661 - protein, 34 aa, Homo sapiens
RHRRLKVGQPWSLPVAGETTKRYYPKVKRSVSLT

SEQ ID NO: 30662 - protein, 34 aa, Homo sapiens
SGRQCFTLLTLYREGRGCLWGFKEFSFAEAFHPS

SEQ ID NO: 30663 - protein, 35 aa, Homo sapiens
LPGQGDWRIRSCAWPRGLKVAVGLCEGQNGDGGPC

SEQ ID NO: 30664 - protein, 35 aa, Homo sapiens
RTYRHRADRPPLQPHGGLSDIEAKEAKLEDRETKS

SEQ ID NO: 30665 - protein, 35 aa, Homo sapiens
TNTKFKGKQEQSSLPAAVLSIAKTLTIHRKIHAVL

SEQ ID NO: 30666 - protein, 36 aa, Homo sapiens
PLKLYSLNGPDPTRSFIAHQLPSICRTLSIGFTIPE

SEQ ID NO: 30667 - protein, 37 aa, Homo sapiens
MNFGLLCNPSGAFTDNIDFEVALTWPALPLTRLALYG

SEQ ID NO: 30668 - protein, 37 aa, Homo sapiens
MVCERISVCLGRKLFDLQKSQKTSRTSIKIHQRAFYY

SEQ ID NO: 30669 - protein, 39 aa, Homo sapiens
LSKFETSLVALLEGVRNFQFWAWAVGLADRPLALGLGAR

SEQ ID NO: 30670 - protein, 39 aa, Homo sapiens
MTMMDIYTYIHIIHNDICVRIYLRLYFVGWAKFSVTITS

SEQ ID NO: 30671 - protein, 40 aa, Homo sapiens [sequence omitted]

SEQ ID NO: 30672 - protein, 40 aa, Homo sapiens
NLASCRLVCPPLLPFPPGPRPLPPQVPSAAIRPLYPPIPR

SEQ ID NO: 30673 - protein, 41 aa, Homo sapiens
MVFLPPGVAGSPWHCTAVGVDRMPLNCLDFQEVNSELCSEA

SEQ ID NO: 30674 - protein, 41 aa, Homo sapiens [sequence omitted]

SEQ ID NO: 30675 - protein, 42 aa, Homo sapiens
MHQLMMTAESGRAEDPKSFPRLAENKLPGRRMRRQETNCLES

SEQ ID NO: 30676 - protein, 42 aa, Homo sapiens
MPAKGHLTCFESQFPDTENKGLSADLCPVCPVAPGDVSSRRG

SEQ ID NO: 30677 - protein, 43 aa, Homo sapiens
RFGGEARKKDSRKERVQFGDEGSRRLGLATTRRRRAGVVRRGS

SEQ ID NO: 30678 - protein, 43 aa, Homo sapiens
MTAPGLLKMSRICINIQQESIIVCPSSRAAKNGGIITSSKATL

SEQ ID NO: 30679 - protein, 12 aa, Homo sapiens
MPDLINLAGETG

SEQ ID NO: 30680 - protein, 89 aa, Homo sapiens [sequence omitted]

SEQ ID NO: 30681 - protein, 45 aa, Homo sapiens
MHYQGGCNTGLPCSLVSVWKALAGWEGRRGVRSGGLSFHCLPAAP

SEQ ID NO: 30682 - protein, 46 aa, Homo sapiens
MDMKSEESDHRRKPFQMTRAPQRQQPQGAAMAPDLSHGCRKLNGGG

SEQ ID NO: 30683 - protein, 46 aa, Homo sapiens
ESSAVEIVQSWGLGGGARTSWGTIPPKRARSETPAQLSCTLFLSGT

SEQ ID NO: 30684 - protein, 46 aa, Homo sapiens
MGIHPAFKGSQSLRKKVTRLRGAGAAGISGSEASEGRRGAGAWATG

SEQ ID NO: 30685 - protein, 46 aa, Homo sapiens
MSSGLYPTTSYLMEGQNNGLPDSQAPPRGSPQERLEAEEFTEATAS

SEQ ID NO: 30686 - protein, 46 aa, Homo sapiens
RPQGWTSGRTFHWPLSERQLIQHLEKTGNRAEFPCTAEEGRGKEWT

SEQ ID NO: 30687 - protein, 47 aa, Homo sapiens
AAGLLVTSSAVAGRGSFASEGCLAGPNSVAPRPPVSAFCIAASAAST

SEQ ID NO: 30688 - protein, 48 aa, Homo sapiens
PGLGEPERQGFPGRRHLRGAGARVRGPLGDRLSLARLSAPGSAPRVTA

SEQ ID NO: 30689 - protein, 48 aa, Homo sapiens
MFMQWFPAFLTQSRDTVGVPSLSPVTGNTSPSSGEFELQRYIWEHFES

SEQ ID NO: 30690 - protein, 49 aa, Homo sapiens
MVVNVARRSRAFQPGGPELRKAPSAVRGAGARGGRALLSLRTAQRCALG

SEQ ID NO: 30691 - protein, 50 aa, Homo sapiens
GGGFIQILFKSLSPEGRALGGGGEVGGARGLGGAGPEQLPSPPPPLASQP

SEQ ID NO: 30692 - protein, 50 aa, Homo sapiens
RPEVGLTDKSETGSPAPLWKVNGSSEGSKESAVSPRELLFAAGEVYASRA

SEQ ID NO: 30693 - protein, 53 aa, Homo sapiens
DLAGASARHSRRAQGAVPDLSSEGRAGFPGGPYLRLRPPAALGKGRSGPDAAR

SEQ ID NO: 30694 - protein, 52 aa, Homo sapiens
TALGRSSRSRLYFRRRETSVASLSCGLSPSPSLAVLRHRTPPHPISRNLQTS

SEQ ID NO: 30695 - protein, 52 aa, Homo sapiens
DARCSGRSYAGRVVVAGCYQDNRRRLTVICGLEPLAGEAEIFRGLLGCAKGS

SEQ ID NO: 30696 - protein, 52 aa, Homo sapiens [sequence omitted]

SEQ ID NO: 30697 - protein, 54 aa, Homo sapiens
PSPSRPGLFFACPPSPYYPLVERESRRSLLVTAGHLEERTTRSTRPGKVQNNCA

SEQ ID NO: 30698 - protein, 55 aa, Homo sapiens
SPVPFLPSRAPLKDHIHCGPPWDQPSFSHSLLPLSLGISVTRRNWVLRHSRACER

SEQ ID NO: 30699 - protein, 55 aa, Homo sapiens
RHLPQTLWPRPRTASGRDYAVTSRCAAQRAASVLAGRPVLRTPYFVVAAARSSAV

SEQ ID NO: 30700 - protein, 55 aa, Homo sapiens
PLWPRVVCNFRSAWDGAQAGPSLVERPGLGAKPGPWAEVRGGLRSDVELRRHPHR

SEQ ID NO: 30701 - protein, 18 aa, Homo sapiens
MPRPGIVAEHPRPAEVPP

SEQ ID NO: 30702 - protein, 56 aa, Homo sapiens
MPGNRRDAVRKATGCRSWKGTPGFPPSEPGWEVTSMRLNFSWIEREARSSACQQPP

SEQ ID NO: 30703 - protein, 20 aa, Homo sapiens
FCLFRPGIVAEHPRPAEVPP

SEQ ID NO: 30704 - protein, 58 aa, Homo sapiens
MAGCALLGCPKWRIQFCRSVQVAGRPHHDGRGFVKWLAWWWTCAVTQEKMAAEGLAAV

SEQ ID NO: 30705 - protein, 58 aa, Homo sapiens
MGSSLAHSVERDPLIHHQHNMVLPALHSVLLLLKRLFCLLKFLCQQSTGRSSGRHRQR

SEQ ID NO: 30706 - protein, 22 aa, Homo sapiens
MAPGCGRVVSHAGAPGGGTRPP

SEQ ID NO: 30707 - protein, 59 aa, Homo sapiens
MGRGGSSPALLSLRGMFPFYSEEEKQRNTSWRRTELKEPGMVTSGRKCVLSPSREAFVS

SEQ ID NO: 30708 - protein, 60 aa, Homo sapiens
MLPCNTPSKWPSQHASKQASSVPLDPHLLRPAAYKKDYILRPYPLKFFPHPKQKISGSKV

SEQ ID NO: 30709 - protein, 60 aa, Homo sapiens
MLAQPPGLKRSFHLGLLSSWDHRTFHWPLSERQLIQHLEKTGNRAEFPCTAEEGRGKEWT

SEQ ID NO: 30710 - protein, 25 aa, Homo sapiens
GDGLKVEELTVTATPLQDAPARNSC

SEQ ID NO: 30711 - protein, 61 aa, Homo sapiens
MRTSLFPLEPHTCCLLCLELSPSALTGFPKCRFLQEALPDELSHFSLCSGSPCTSWLLSSL

SEQ ID NO: 30712 - protein, 62 aa, Homo sapiens
MAFLSVNIQISGFSSTGWGWESCFSLNFSLRDALRALGKSRNKYQEQRGKLYKRSWWPLLQL

SEQ ID NO: 30713 - protein, 64 aa, Homo sapiens
MGARAAEEAPLVCPLVERALPALRGFQPGSFGKPGRLLTGDDTCVGCWVSWCIGAGTGSILQCN

SEQ ID NO: 30714 - protein, 64 aa, Homo sapiens
MFNGANSISFSFSSSSSSSSSSSSSFSSSSFSSHQQEDKPRTVLKYRNFLFGICQRQDCRNKGR

SEQ ID NO: 30715 - protein, 64 aa, Homo sapiens
MKGKGFVWKNALECDISARMLKYRFPAGTMALSSVAQWSSSEDAKIHEKTSRTSGRIFNGKSLG

SEQ ID NO: 30716 - protein, 65 aa, Homo sapiens
TLLLFPPPEQIVPAAWPVAHSGLPATLGKIEQRQRRKGGSIFQAALPQAHVLCSCQAENTKCSNK

SEQ ID NO: 30717 - protein, 66 aa, Homo sapiens [sequence omitted]

SEQ ID NO: 30718 - protein, 67 aa, Homo sapiens
MKGKGFVWKNALECDISARMLKYRFPAGTMALSSVAQWSSSEDAKRYTKKLPEHLGEYLMENRLVKT

SEQ ID NO: 30719 - protein, 68 aa, Homo sapiens
MTDKIEATWRQLPHPSTSSPAFMPVLWSFPADSGSHLPREPPSWASPSVKLHSSIFYTCSGGILTVMH

SEQ ID NO: 30720 - protein, 69 aa, Homo sapiens
MNPVPQMEMQKSPVFCVAHAGSCRPELFLFGHLGSSECDFEERRKDVKSDWSATFMVLRKEFAFLEHSL

SEQ ID NO: 30721 - protein, 73 aa, Homo sapiens
MRGAPGSEESPGPGAAPGSGPGGRGRRDSAQLGGPGPSPRHLEPGAVPNSVLGTAAPSRAAPAGTLTRTPCAS

SEQ ID NO: 30722 - protein, 74 aa, Homo sapiens
AGLRAEVSPHCVFFSFYPKNGAVSTLAFLSPGWERGWCAEWFAFFSLELVSLFFFFFFFSFFRLSAVRAGLPGP

SEQ ID NO: 30723 - protein, 75 aa, Homo sapiens
SPVPFLPSRAPLKDHIHCGPPWDQPRSVEVTLQPSTSLLRPALLCPPSTGVAKGTAQLACDPQLRLLPGQLTSSL

SEQ ID NO: 30724 - protein, 75 aa, Homo sapiens
RPPTPPPLPGARAAAQRASRPRGRSGARQGWGGRAQGPGAGEGAGHRAEGGGSGAEVCLGLAGRCGGSLGRGLFS

SEQ ID NO: 30725 - protein, 58 aa, Homo sapiens
MLDTWCQNLGQGDSFVRPAPCPGPHSVKRSTCDLGSSDQPKEHLTNFKSDLLGLVAED

SEQ ID NO: 30726 - protein, 78 aa, Homo sapiens
MSNRCERAGRPRSDSGRLYKELLAAHFGLLRRPSRASGRVVGTMALSSVAQWSSSEDAKIHEKTSRTSGRIFNGKSLG

SEQ ID NO: 30727 - protein, 79 aa, Homo sapiens
RRPHFLAFPPPPPRRYPVHPGHLPSPLGAAAWLVAALPQGQVLRGSRSGCRRSPAPDPGLPLAPLRSRLCGSRRAQERD

SEQ ID NO: 30728 - protein, 79 aa, Homo sapiens [sequence omitted]

SEQ ID NO: 30729 - protein, 79 aa, Homo sapiens
MSCGSRRGPSLASSLAWLQLQSGTRPFCSSSPPYFLSHGRRIPFSHPRKESALRATKEPRTHRTNTSLADLPSPAPAHL

SEQ ID NO: 30730 - protein, 83 aa, Homo sapiens
VHSRAHGRLHSHHRGKLRPRGRRPERSGPVLGAVSRPLCRSEPPRIRVSSGKTLAGLVGCAAPRTASHQPAPSLSCSTLICTP

SEQ ID NO: 30731 - protein, 84 aa, Homo sapiens
RFFPQASGLFGALVACLPNSAASPRQEHFLPRLLKLVRGFPTSQKSFIGPPLETSDRSHRRLASGICPHPRGQVRDQRPAKPSP

SEQ ID NO: 30732 - protein, 84 aa, Homo sapiens
ARGARSSDCSSSSSSGGGSSSSSGGSSSSSGGTGGSSSITSNNNKKKSSSNPHLSFQCIQIHIFTQARRGKEERGAGKKKNPTT

SEQ ID NO: 30733 - protein, 86 aa, Homo sapiens
MDCGRVSLIWTVMRKDRITGSQIHKPHQEDHPRNAWRLRSSLRLLHLETQDEDPAWGCQRFFACLTPMTPPGPYGSTQKQFSPTGG

SEQ ID NO: 30734 - protein, 87 aa, Homo sapiens
MRPASHPRCWGRSWIFMPAASTQGELRKCLLGARNTHLSGNAAQRVPASFSSPHSKWSRSGSNASDKCVPTCQAHPSCRPLSWCHPA

SEQ ID NO: 30735 - protein, 87 aa, Homo sapiens
MEPSHGRYWTTNVHNMKPKCGTHSSIIFLFQWVTRMELRCCLQEKLTTGFYFSNLIGGYAGTVSRLSIFNPVSKNFFTTITFRFLPL

SEQ ID NO: 30736 - protein, 87 aa, Homo sapiens
ASLLWFLLWVLWDGAWLWPRGLSRRGAGRGNAATLSLVSRLRRPVSEVSGAVNKGSGLASGLRSHVWKRGASSICVYIIDYAREFSR

SEQ ID NO: 30737 - protein, 88 aa, Homo sapiens
MPGRAFEGYCHAAFLEPAGWCPGGLYLCPPLSSLSQALQEAGGPTPPIAPLGYAATSMPRRSRAAVLSKASENQGRPAPPLTRSSAEH

SEQ ID NO: 30738 - protein, 90 aa, Homo sapiens
MSPQEAPRVAELHAPGLSLPQVPCVLSHGLWPRNVFSHFGLRSPKRSPETKLLELEFVCVRTCARGGEGVCFRLFYASLSPNSQIIVTFV

SEQ ID NO: 30739 - protein, 91 aa, Homo sapiens
MLGPQPDLPCVPRSVLRSGCRAVAWRKPGRCHQSFGEGEALSGKPSGSHEGGNTCGALVGGGAALQRSKKKFQKNEQQPPRPGIGAGDKGS

SEQ ID NO: 30740 - protein, 92 aa, Homo sapiens
PFYFWGFVFVLNFPVTFSGLTSHVGGVYEWRRAWVLGTGGQGSFCPGVPGCSACSARPLLGATRPETQLGQLGGLCPPSPPVLWAAQLTLFP

SEQ ID NO: 30741 - protein, 101 aa, Homo sapiens [sequence omitted]

SEQ ID NO: 30742 - protein, 101 aa, Homo sapiens
PPAQGHFRYRSSLASAENCQVSSGPAEIAERRRTQPAPPGPSRPSGPGPAGELGGPGTGRALCPADNGGLCCGCPLAVPAHWLCPDLEAAANLSFPPHLGD

SEQ ID NO: 30743 - protein, 102 aa, Homo sapiens
ARGFSALSPRRIPGVDLLAASLCLPSCAPFPASRCCWRALAGFFLPRPRDGGECGTEEPGLPTRWARAPKGPLGSERGGSPRGPRPSLASDCATLRSGLTGG

SEQ ID NO: 30744 - protein, 104 aa, Homo sapiens
MKYNDITVKPFHFDSEVTLLTSITHLYFALINMLASLSGFLMTTTSKHAAYCLKGSCLTQARVQWPLKLTTASNFWAQVILSLPVVFVDCLMESHGTRRLKQCL

SEQ ID NO: 30745 - protein, 104 aa, Homo sapiens [sequence omitted]

SEQ ID NO: 30746 - protein, 106 aa, Homo sapiens [sequence omitted]

SEQ ID NO: 30747 - protein, 108 aa, Homo sapiens
GAAPSSALPAPCCRRARRGSRAGAERAVRAATGDQAAGGRAGGGGARGGVAADGDAEPGGCGGCGGCGCGGGGEAADGPAAAAALAAVTGPGPGGGCSNAVAGCGRAA

SEQ ID NO: 30748 - protein, 109 aa, Homo sapiens
GGGREQAALAFGFCPVACSLPGPFQHHRRRRSTLAATVRAAPTRPAARPSEGRQKPLCVLHRRAPARPSGRGVCPASRRGVCGRAGVCECGRGRGPSDLLHPSVLLGTH

SEQ ID NO: 30749 - protein, 112 aa, Homo sapiens
MLGFPTRGARESARGCGGERGTLFPVCFRFFPQASGLFGALVACLPNSAASPRQEHFLPRLLKLVRGFPTSQKSFIGPPLETSDRSHRRLASGICPHPRGQVRDQRPAKPSP

SEQ ID NO: 30750 - protein, 112 aa, Homo sapiens
MGRRCGNVHSRAPLSGTRAASQEELGEQLRPVHNLGRRQGLAGSTSGAWRRKTRVPGRGAEAGWGTAWSRARAGRRCSVSRLVWGAGGGKRPLRVRLGEAGRRFCPPTRTRR

SEQ ID NO: 30751 - protein, 118 aa, Homo sapiens
MRPGSSPRAPECGAPALPRPQLDRLPARPAPSRGRGAPSLRWPAKEVGPRPQIPATCEPGKVCGASAGRRDAARPSRPRSSRVTFSTRRQPGPQRGRWGLRGGPESVRGLPHLGLREH

SEQ ID NO: 30752 - protein, 120 aa, Homo sapiens
MGRRCGNVHSRAPLSGTRAASQEELGEQLRPVHNLGRRQGLAGSTSGAWRRKTRVPGRGAEAGWGTAWSRARAGRRCSVSRLVWGAGGGKRPLRVRLGEAGRRFCPPTRTRRFLVLIPCG

SEQ ID NO: 30753 - protein, 125 aa, Homo sapiens
MRLRWIQGAGAQIHQDQGRFLRARCPSGPEENPFSACLRWRTQWPPPPALRPPQGPDPELDDRTPSHLSPQNPCQPAGGRGARPPASGKHSVPAGACAGATLPGPLWLRLRALALARGAATGSAF

SEQ ID NO: 30754 - protein, 127 aa, Homo sapiens
YTKGKGTLLTGSTTSALWGITHSSAPEESVTSRRASPRLVAPRPASPRRLPSIRTSSKEELVPLPDPLPRASCVESLDWAELWRARRQTATLCCRGREEEGKARHTGVVQLRKDSVSCRGRRDLTAR

SEQ ID NO: 30755 - protein, 133 aa, Homo sapiens
MDKKSTHRNPEDARAGKYEGKHKRKKRRKQNQNQHRSRHRSVTSFSSDDPMFPSSSSSSSGSQTDSSIEDAAKGKIKKKRREKTNKWEKRKGQNMKHQEKEKEKKEETTTYVTFPRGTETGLTLLISKLSVLV

SEQ ID NO: 30756 - protein, 141 aa, Homo sapiens
GAAGGEAGDGGVGSGRTAPPLPGAWARHPPAGPHRAELCFLLAASLREAPPLLPGSPPADSFLAGPRCAPPQWLEEQLSSQPLQPLSFSLSTGPPRIPWLGTEAGEEAGVATAEVAAATPLRGWPGFPAGGVPFWVRHPPW

SEQ ID NO: 30757 - protein, 145 aa, Homo sapiens [sequence omitted]

SEQ ID NO: 30758 - protein, 148 aa, Homo sapiens
GGWETCNRGGGKKNVLKKNIKKKTSHLAASAREVQRASSGLPARPQTTAGEPPAPAWPPASPRPSVRRSVSLPFPHASFLRAPRGSGGRRGPLGLQDALGPRRCRQRLGGGGACRTRYLAGSGLCRAEPRSPYSTAGASDASACGVLP

SEQ ID NO: 30759 - protein, 148 aa, Homo sapiens
RKNVRSVPYGFCRSSSSCIFPTKPFAASGRRGQSPVGPVSHRGRRWPLSPGARSASWCYCCGQLGGFLQTTGLGPGIPVGRQPESPYCASESTLRAVRICEPGAVTYFDRYHFGSFYIKFLFSKEYKTYPIALCEPAIPLPPGDRADQ

SEQ ID NO: 30760 - protein, 12 aa, Homo sapiens
MVAQAELRALIL

SEQ ID NO: 30761 - protein, 36 aa, Homo sapiens
MDTRAFKTALPACRAFAVLQRFTGVIALKPRNNFTR

SEQ ID NO: 30762 - protein, 42 aa, Homo sapiens
MDTRAFKTALPACRAFAVLQRFTGVIALKPRNNFTSDSTRKE

SEQ ID NO: 30763 - protein, 52 aa, Homo sapiens
MGRWRVSSVESWPFASTGGKLAIATAGTGTQAAPRPFLIRPPDSWALALALM

SEQ ID NO: 30764 - protein, 92 aa, Homo sapiens
WKTLAGTQSPRVDTAVGWWQGSSRCHQAHERWSLQRCEQLLEEEVLLKTLRPARLCPWCPGCLESLTPGPWGQDSRTLTTCPPPASAAAPPR

SEQ ID NO: 30765 - protein, 6 aa, Homo sapiens
RLRRVA

SEQ ID NO: 30766 - protein, 19 aa, Homo sapiens
MITKVVFPGRGLSIALRMC

SEQ ID NO: 30767 - protein, 50 aa, Homo sapiens
MVLGADAVWLWIAPYGQLCPQGRMRIATEVLKSKPNSSHWHTGIRQKAGS

SEQ ID NO: 30768 - protein, 12 aa, Homo sapiens
KVHVLLMLTLID

SEQ ID NO: 30769 - protein, 5 aa, Homo sapiens
MVAAF

SEQ ID NO: 30770 - protein, 5 aa, Homo sapiens
MRTNL

SEQ ID NO: 30771 - protein, 4 aa, Homo sapiens
LGYY

SEQ ID NO: 30772 - protein, 22 aa, Homo sapiens
VKLQKTWGGMAREDAKDWGRGS

SEQ ID NO: 30773 - protein, 12 aa, Homo sapiens
MSPALSTKELMG

SEQ ID NO: 30774 - protein, 30 aa, Homo sapiens
LINLIKINVSQMTLRPAGYHRLQMLNAQWR

SEQ ID NO: 30775 - protein, 114 aa, Homo sapiens
LLKTLQSALIPSALSPHPEKYMEFDLNGNGDIDIMSLKRMLEKLGVPKTHLELKKLIGEVSSGSGETFSYPDFLRMMLGKRSAILKMILMYEEKAREKEKPTGPPAKKAISELP

SEQ ID NO: 30776 - protein, 22 aa, Homo sapiens
MDGMTELGCDSIEKLKAQIPKM

SEQ ID NO: 30777 - protein, 19 aa, Homo sapiens
MALSSVAQWSSSEDAKVRA

SEQ ID NO: 30778 - protein, 16 aa, Homo sapiens
MRSFAVHQDLGPSGIS

SEQ ID NO: 30779 - protein, 115 aa, Homo sapiens
MTKKRRNNGRAKKGCGHVQPIRCTNCARCMPKDKAIKKFVIRNIVEAAAVRDISEASVFDAYVLPKLYVKLHYCVSCAIHSKVVRNRSREVRKDRTPPPRFRPAGAAPRPPPKPM

SEQ ID NO: 30780 - protein, 462 aa, Homo sapiens
MGKEKTHINIVVIGHVDSGKSTTTGHLIYKCGGIDKRTIEKFEKEAAEMGKGSFKYAWVLDKLKAERERGITIDISLWKFETSKYYVTIIDAPGHRDFIKNMITGTSQADCAVLIVAAGVGEFEAGISKNGQTREHALLAYTLGVKQLIVGVNKMDSTEPPYSQKRYEEIVKEVSTYIKKIGYNPDTVAFVPISGWNGDNMLEPSANMPWFKGWKVTRKDGNASGTTLLEALDCILPPTRPTDKPLRLPLQDVYKIGGIGTVPVGRVETGVLKPGMVVTFAPVNVTTEVKSVEMHHEALSEALPGDNVGFKVKNVSVKDVRRGNVAGDSKNDPPMEAAGFTAQVIILNHPGQISAGYAPVLDCHMAHIACKFAELKEKIDRRSGKKLEDGPKFLKSGDAAIVDMVPGKPMCVESFSDYPPLGRFAVRDMRQTVAVGVIKAVDKKAAGAGKVTKSAQKAQKAK

SEQ ID NO: 30781 - protein, 30 aa, Homo sapiens [sequence omitted]

SEQ ID NO: 30782 - protein, 4 aa, Homo sapiens
LLLQ

SEQ ID NO: 30783 - protein, 452 aa, Homo sapiens
IYCLDPPLSSVPSEDEWYCPECRNDASEVVLAGERLRESKKKAKMASATSSSQRDWDKGMACVGRTKECTIIPSNHYGPIPGIPVGTMWRFRVQVSESGVHRPHVAGIHGRSNDGAYSLVLAGGYEDDVDHGNFFTYTGSGGRELSGNKRTAEQSCDQKLTNTNRALALNCFAPINDQEGAEAKDWRSGKPVRVVRNVKGGKNSKYAPAEGNRYDGIYKVVKYWPEKGKSGFLVWRYLLRRDDDEPGPWTKEGKDRIKKLGLTMQYPEGYLEALANREREKENSKREEEEQQEGGFASPRTGKGKWKRKSAGGGPSRAGSPRRTSKKTKVEPYSLTAQQSSLIREDKSNAKLWNEVLASLKDRPASGSPFQLFLSKVEETFQCICCQELVFRPITTVCQHNVCKDCLDRSFRAQVFSCPACRYDLGRSYAMQVNQPLQTVLNQLFPGYGNGR

SEQ ID NO: 30784 - skipped

SEQ ID NO: 30785 - protein, 6 aa, Homo sapiens
IKETST

SEQ ID NO: 30786 - protein, 34 aa, Homo sapiens
KVDNYCTFLMEKVLFKVLFLIEYYQKGKKNDLNF

SEQ ID NO: 30787 - protein, 108 aa, Homo sapiens
LDNCKSNDGKIEGLTAEFVNLEFLSLINVGLISVSNLPKLPKLKKLELSENRIFGGLDMLAEKLPNLTRLNLSGNKLKDISTLEPLKKLECLKSLDLFNCEVTNMNDY

SEQ ID NO: 30788 - protein, 1880 aa, Homo sapiens
VKTMKVLRCVCFFCSKLLVDSNNPKIKDILAKSKGQPKKRLTHVYDLCKGKNICEGGEEMDNKFGVEQPEGDEDLTKEKGHGGCGRYQPRIRRSGLELYAEWKHVNEDSQEKKILLSPERVHEIFKRISDEECFVLGMEPRYARPEWMIVTVLPVPPLSVRPAVVMQGSARNQDDLTHKLADIVKINNQLRRNEQNGAAAHVIAEDVKLLQFHVATMVDNELPGLPRAMQKSGRPLKSLKQRLKGKEGRVRGNLMGKRVDFSARTVITPDPNLSIDQVGVPRSIAANMTFAEIVTPFNIDRLQELVRRGNSQYPGAKYIIRDNGDRIDLRFHPKPSDLHLQTGYKVERHMCDGDIVIFNRQPTLHKMSMMGHRVRILPWSTFRLNLSVTTPYNADFDGDEMNLHLPQSLETRAEIQELAMVPRMIVTPQSNRPVMGIVQDTLTAVRKFTKRDVFLERGEVMNLLMFLSTWDGKVPQPAILKPRPLWTGKQIFSLIIPGHINCIRTHSTHPDDEDSGPYKHISPGDTKVVVENGELIMGILCKKSLGTSAGSLVHISYLEMGHDITRLFYSNIQTVINNWLLIEGHTIGIGDSIADSKTYQDIQNTIKKAKQDVIEVIEKAHNNELEPTPGNTLRQTFENQVNRILNDARDKTGSSAQKSLSEYNNFKSMVVSGAKGSKINISQVIAVVGQQNVEGKRIPFGFKHRTLPHFIKDDYGPESRGFVENSYLAGLTPTEFFFHAMGGREGLIDTAVKTAETGYIQRRLIKSMESVMVKYDATVRNSINQVVQLRYGEDGLAGESVEFQNLATLKPSNKAFEKKFRFDYTNERALRRTLQEDLVKDVLSNAHIQNELEREFERMREDREVLRVIFPTGDSKVVLPCNLLRMIWNAQKIFHINPRLPSDLHPIKVVEGVKELSKKLVIVNGDDPLSRQAQENATLLFNIHLRSTLCSRRMAEEFRLSGEAFDWLLGEIESKFNQAIAHPGEMVGALAAQSLGEPATQMTLNTFHYAGVSAKNVTLGVPRLKELINISKKPKTPSLTVFLLGQSARDAERAKDILCRLEHTTLRKVTANTAIYYDPNPQSTVVAEDQEWVNVYYEMPDFDVARISPWLLRVELDRKHMTDRKLTMEQIAEKINAGFGDDLNCIFNDDNAEKLVLRIRIMNSDENKMQEEEEVVDKMDDDVFLRCIESNMLTDMTLQGIEQISKVYMHLPQTDNKKKIIITEDGEFKALQEWILETDGVSLMRVLSEKDVDPVRTTSNDIVEIFTVLGIEAVRKALERELYHVISFDGSYVNYRHLALLCDTMTCRGHLMAITRHGVNRQDTGPLMKCSFEETVDVLMEAAAHGESDPMKGVSENIMLGQLAPAGTGCFDLLLDAEKCKYGMEIPTNIPGLGAAGPTGMFFGSAPSPMGGISPAMTPWNQGATPAYGAWSPSVGSGMTPGAAGFSPSAASDASGFSPGYSPAWSPTPGSPGSPGPSSPYIPSPGGAMSPSYSPTSPAYEPRSPGGYTPQSPSYSPTSPSYSPTSPSYSPTSPNYSPTSPSYSPTSPSYSPTSPSYSPTSPSYSPTSPSYSPTSPSYSPTSPSYSPTSPSYSPTSPSYSPTSPSYSPTSPSYSPTSPSYSPTSPSYSPTSPSYSPTSPSYSPTSPNYSPTSPNYTPTSPSYSPTSPSYSPTSPNYTPTSPNYSPTSPSYSPTSPSYSPTSPSYSPSSPRYTPQSPTYTPSSPSYSPSSPSYSPTSPTSTPQPVLLTVPAPQSIPQPLPSTHLPVPNIHPPLPSTRLPVPPIHPPPQNTPQHLLLIPQPLQSTPQPLPSTHLLAPLTRPLPPSTRPPAPPTRPPPPKAQPTLPLPLVTRPPAPPTVSQARLSARMTVTRRTEGTWGAAAG

SEQ ID NO: 30789 - protein, 7 aa, Homo sapiens
VALKTVM

SEQ ID NO: 30790 - protein, 8 aa, Homo sapiens
RIFMMKFL

SEQ ID NO: 30791 - protein, 30 aa, Homo sapiens
VTPRRPFEKSRLDQELKLIGEYGFRNKREV

SEQ ID NO: 30792 - protein, 32 aa, Homo sapiens [sequence omitted]

SEQ ID NO: 30793 - skipped

SEQ ID NO: 30794 - protein, 17 aa, Homo sapiens
MLSSRFNSMAPNDEISF

SEQ ID NO: 30795 - protein, 65 aa, Homo sapiens
VKLNLVRWTLGQTARERQARGLTSSTPEFEPYEQWNLGTTKDPDIILSSVIEKRIWDLRRYLLIF

SEQ ID NO: 30796 - protein, 118 aa, Homo sapiens
MVSSHVERVFQIYEQHADTVGIDAVLQPSAVSPSVADMLEWLQDIERHYRKSKVPEEKVSSFVYPVGRLGKHTSFAQGLGPNFKRRTPRSCTRYPIECFLLPGRVRKLCVSGDHGYHS

SEQ ID NO: 30797 - protein, 179 aa, Homo sapiens
MSKRKRKRSVQEGENPDDGVRGSPPEDYRLGQVASSLFRGEHHSRGGTGRLASLFSSLEPQIQPVYVPVPKQTIKKTKRNEEEESTSQIERPLSQEPAKKVKAKKKHTNAEKKLADRLVKFSYLMLKKLDGKLTFLYLEYSSVLFHISTFFQNFYYGKSSTYRKVEKAKKPRVLSISNY

SEQ ID NO: 30798 - protein, 2355 aa, Homo sapiens
MDGCFCPEGTVYDDIGDSGCVPVSQCHCRLHGHLYTPGQEITNDCEQCVCNAGRWVCKDLPCPGTCALEGGSHITTFDGKTYTFHGDCYYVLAKGDHNDSYALLGELAPCGSTDKQTCLKTVVLLADKKKNVVVFKSDGSVLLNELQVNLPHVTASFSVFRPSSYHIMVSMAIGVRLQVQLAPVMQLFVTLDQASQGQVQGLCGNFNGLEGDDFKTASGLVEATGAGFANTWKAQSTCHDKLDWLDDPCSLNIESANYAEHWCSLLKKTETPFGRCHSAVDPAEYYKRCKYDTCNCQNNEDCLCAALSSYARACTAKGVMLWGWREHVCNKDVGSCPNSQVFLYNLTTCQQTCRSLSEADSHCLEGFAPVDGCGCPDHTFLDEKGRCVPLAKCSCYHRGLYLEAGDVVVRQEERCVCRDGRLHCRQIRLIGQSCTAPKIHMDCSNLTALATSKPRALSCQTLAAGYYHTECVSGCVCPDGLMDDGRGGCVVEKECPCVHNNDLYSSGAKIKVDCNTCTCKRGRWVCTQAVCHGTCSIYGSGHYITFDGKYYDFDGHCSYVAVQDYCGQNSSLGSFSIITENVPCGTTGVTCSKAIKIFMGRTELKLEDKHRVVIQRDEGHHVAYTTREVGQYLVVESSTGIIVIWDKRTTVFIKLAPSYKGTVCGLCGNFDHRSNNDFTTRDHMVVSSELDFGNSWKEAPTCPDVSTNPEPCSLNPHRRSWAEKQCSILKSSVFSICHSKVDPKPFYEACVHDSCSCDTGGDCECFCSAVASYAQECTKEGACVFWRTPDLCPIFCDYYNPPHECEWHYEPCGNRSFETCRTINGIHSNISVSYLEGCYPRCPKDRPIYEEDLKKCVTADKCGCYVEDTHYPPGASVPTEETCKSCVCTNSSQVVCRPEEGKILNQTQDGAFCYWEICGPNGTVEKHFNICSITTRPSTLTTFTTITLPTTPTTFTTTTTTTTPTSSTVLSTTPKLCCLWSDWINEDHPSSGSDDGDRETFDGVCGAPEDIECRSVKDPHLSLEQLGQKVQCDVSVGFICKNEDQFGNGPFGLCYDYKIRVNCCWPMDKCITTPSPPTTTPSPPPTSTTTLPPTTTPSPPTTTTTTPPPTTTPSPPITTTTTPPPTTTPSPPISTTTTPPPTTTPSPPTTTPSPPTTTPSPPTTTTTTPPPTTTPSPPTTTPITPPASTTTLPPTTTPSPPTTTTTTPPPTTTPSPPTTTPITPPTSTTTLPPTTTPSPPPTTTTTPPPTTTPSPPTTTTPSPPTITTTTPPPTTTPSPPTTTTTTLPPTTTSSPLTTTPLPPSITPPTFSPFSTTTPTTPCVPLCNWTGWLDSGKPNFHKPGGDTELIGDVCGPGWAANISCRATMYPDVPIGQLGQTVVCDVSVGLICKNEDQKPGGVIPMAFCLNYEINVQCCECVTQPTTMTTTTTENPTPTPITTTTTVTPTPTPTSTQSTTPTPITTTNTVTPTPTPTGTQTPTPTPITTTTTMVTPTPTITSTQTPTPTPITTTTVTPTPTPTSTQRTTPTSITTTTTVTPTPTPTGTQTPTTTPITTTTTVTPTPTPTGTQTPTTTPITTTTMVTPTPTPTGTQTQTPTPITTTTTVTPTPTPTGTQTPTSTPISTTTTVTPTPTPTGTQTPTLTPITTTTTVTPTPTPTGTQTPTTTPITTTTTVTPTPTPTGTKSTTPTSITTTTMVTPTPPPTGTQTPTTTPITTTTTVTPTPTPTGTQTPTPTPITTTTTVTPTPTPTGTQTPTSTPITTNTTVTPTPTPTGTPSTTLTPITTTTMVTPTPTPTGTQTPTSTPISTTTTVTPTSTPTGTQTPTPTPISTTTTVTPTPTPISTTTTVTPTPTPTGTQTPTMTPITTTTTVTPTPTPTGTQTPTTTPISTTTTVTPTPTPTGTQTPTSTPITTTTTVTPTPTPTGTQTPTTTPITTTTTVTPTPTPTGTQSTTLTPITTTTTVTPTPTPTGTQTPTPTPISTTTTVTPTPTPTGTQTPTTTPITTTTTVTPTPTPTGTQTPTTTPISTTTTVTPTPTPTGTQTPTSTPITTTTTVTPTPTPTGTQTPTTTPITTTTTVTPTPTPTGTQAPTPTAITTTTTVTPTPTPTGTQTPTTTPITTTTMVTPTPTPTGTQTPTSTPITTTTTVTPTPTPTGTQTPTPTPISTTTTVTPTPTPTGTQTPTMTPITTTTTVTPTPTPTGTQTPTTTPISTTTTVTPTPTPTGTQTPTSTPITTTTTVTPTPTPTGTQTPTPTPITTTTTVTPTPTPTGTQTPTSTPITTTTTVTPTPTPTGTQTPTTTPITTTTTVTPTPTPTGTQSTTLTPITTTTTVNTNPQHPPAHKTPTSTPITTHHYG

SEQ ID NO: 30799 - protein, 71 aa, Homo sapiens
MVARLGRGSGRFAHPRAGGDWREAAVGCRALRRAWGVAVSVSELCSRRRGETREAIVATLRLLVSSQAVRP

SEQ ID NO: 30800 - protein, 13 aa, Homo sapiens
MKATNLKLRNLPF

SEQ ID NO: 30801 - protein, 75 aa, Homo sapiens [sequence omitted]

SEQ ID NO: 30802 - protein, 45 aa, Homo sapiens
MKLTIPVFLFKSLQFIMELLYWLLEGGDSEDKEVILSLLKEYFPL

SEQ ID NO: 30803 - protein, 46 aa, Homo sapiens
MAARISKKRMLVADGIFKAERNQFLTPELAKDASLKLRFKLHPSRQ

SEQ ID NO: 30804 - protein, 1980 aa, Homo sapiens
MHGGGPPSGDSACPLRTIKRVQFGVLSPDELKRMSVTEGGIKYPETTEGGRPKLGGLMDPRQGVIERTGRCQTCAGNMTECPGHFGHIELAKPVFHVGFLVKTMKVLRCVCFFCSKLLVDSNNPKIKDILAKSKGQPKKRLTHVYDLCKGKNICEGGEEMDNKFGVEQPEGDEDLTKEKGHGGCGRYQPRIRRSGLELYAEWKHVNEDSQEKKILLSPERVHEIFKRISDEECFVLGMEPRYARPEWMIVTVLPVPPLSVRPAVVMQGSARNQDDLTHKLADIVKINNQLRRNEQNGAAAHVIAEDVKLLQFHVATMVDNELPGLPRAMQKSGRPLKSLKQRLKGKEGRVRGNLMGKRVDFSARTVITPDPNLSIDQVGVPRSIAANMTFAEIVTPFNIDRLQELVRRGNSQYPGAKYIIRDNGDRIDLRFHPKPSDLHLQTGYKVERHMCDGDIVIFNRQPTLHKMSMMGHRVRILPWSTFRLNLSVTTPYNADFDGDEMNLHLPQSLETRAEIQELAMVPRMIVTPQSNRPVMGIVQDTLTAVRKFTKRDVFLERGEVMNLLMFLSTWDGKVPQPAILKPRPLWTGKQIFSLIIPGHINCIRTHSTHPDDEDSGPYKHISPGDTKVVVENGELIMGILCKKSLGTSAGSLVHISYLEMGHDITRLFYSNIQTVINNWLLIEGHTIGIGDSIADSKTYQDIQNTIKKAKQDVIEVIEKAHNNELEPTPGNTLRQTFENQVNRILNDARDKTGSSAQKSLSEYNNFKSMVVSGAKGSKINISQVIAVVGQQNVEGKRIPFGFKHRTLPHFIKDDYGPESRGFVENSYLAGLTPTEFFFHAMGGREGLIDTAVKTAETGYIQRRLIKSMESVMVKYDATVRNSINQVVQLRYGEDGLAGESVEFQNLATLKPSNKAFEKKFRFDYTNERALRRTLQEDLVKDVLSNAHIQNELEREFERMREDREVLRVIFPTGDSKVVLPCNLLRMIWNAQKIFHINPRLPSDLHPIKVVEGVKELSKKLVIVNGDDPLSRQAQENATLLFNIHLRSTLCSRRMAEEFRLSGEAFDWLLGEIESKFNQAIAHPGEMVGALAAQSLGEPATQMTLNTFHYAGVSAKNVTLGVPRLKELINISKKPKTPSLTVFLLGQSARDAERAKDILCRLEHTTLRKVTANTAIYYDPNPQSTVVAEDQEWVNVYYEMPDFDVARISPWLLRVELDRKHMTDRKLTMEQIAEKINAGFGDDLNCIFNDDNAEKLVLRIRIMNSDENKMQEEEEVVDKMDDDVFLRCIESNMLTDMTLQGIEQISKVYMHLPQTDNKKKIIITEDGEFKALQEWILETDGVSLMRVLSEKDVDPVRTTSNDIVEIFTVLGIEAVRKALERELYHVISFDGSYVNYRHLALLCDTMTCRGHLMAITRHGVNRQDTGPLMKCSFEETVDVLMEAAAHGESDPMKGVSENIMLGQLAPAGTGCFDLLLDAEKCKYGMEIPTNIPGLGAAGPTGMFFGSAPSPMGGISPAMTPWNQGATPAYGAWSPSVGSGMTPGAAGFSPSAASDASGFSPGYSPAWSPTPGSPGSPGPSSPYIPSPGGAMSPSYSPTSPAYEPRSPGGYTPQSPSYSPTSPSYSPTSPSYSPTSPNYSPTSPSYSPTSPSYSPTSPSYSPTSPSYSPTSPSYSPTSPSYSPTSPSYSPTSPSYSPTSPSYSPTSPSYSPTSPSYSPTSPSYSPTSPSYSPTSPSYSPTSPSYSPTSPNYSPTSPNYTPTSPSYSPTSPSYSPTSPNYTPTSPNYSPTSPSYSPTSPSYSPTSPSYSPSSPRYTPQSPTYTPSSPSYSPSSPSYSPTSPTSTPQPVLLTVPAPQSIPQPLPSTHLPVPNIHPPLPSTRLPVPPIHPPPQNTPQHLLLIPQPLQSTPQPLPSTHLLAPLTRPLPPSTRPPAPPTRPPPPKAQPTLPLPLVTRPPAPPTVSQARLSARMTVTRRTEGTWGAAAG

SEQ ID NO: 30805 - protein, 359 aa, Homo sapiens
MAINRFRLENVTPEGDWQREWMGDGEGHFEGAVGSTMAPEERSGGSGWWEEARRNWFSVCPLSRRRRSLGRKGRMGGQVGCQGLPLTPSFPLFTLSSLPQDLEELALYQIQLLKDLRHTENEEDKVSSSSFRQRMLGNLLRPPYERPELPTCLYVIGLTGISGSGKSSIAQRLKGLGAFVIDSDHLGHRAYAPGGPAYQPVVEAFGTDILHKDGIINRKVLGSRVFGNKKQLKILTDIMWPIIAKLAREEMDRAVAEGKRVCVIDAAVLLEAGWQNLVHEVWTAVIPETEAVRRIVERDGLSEAAAQSRLQSQMSGQQLVEQSHVVLSTLWEPHITQRQVEKAWALLQKRIPKTHQALD

SEQ ID NO: 30806 - protein, 27 aa, Homo sapiens
MRKMKRCWKPRKHTSRLPCQQGAANKR

SEQ ID NO: 30807 - protein, 59 aa, Homo sapiens [sequence omitted]

SEQ ID NO: 30808 - protein, 415 aa, Homo sapiens
MWEIIRNLMSVGIKWEDRNIEDQYKNSRRNPRNHMAERLCECKDGQCGETFSLIPDGIMNKNTLPGVKPCESSVCGEGNVDHSSLNCYIRADTGHKPYECQEHGEKPHKCKQCVKTFSCLHSFQTHEKPHTGEKPYDCKEWEKTFDSPQTVRRYRVVHSGDGPYKCKFCGKAFDNLSLYLTHERSHTGQKPYECNECGKAFGFPSSFHRHERMHTGEKPYECKQCGKTFSCSSSIKKHERIHTGEKPYECKQCGKAFASSNSFQYHERTHTGEKPYECKQCGKAFNCSSSLRKHARIHTGEKPYICKQCGKAFRFPSSIKNHEKTHTGEKPYECQECGKAFRYSSSLRVHKRIHTGEKPYECEDCGKAFSHPTTFHRHKITHTAEKPYECQECGEAFRYPVAFRRHKITHTAEKL

SEQ ID NO: 30809 - protein, 18 aa, Homo sapiens
MELVIWDLGLLIFLTVVS

SEQ ID NO: 30810 - protein, 36 aa, Homo sapiens
MCVRGVLWESMDPEVPGKQVPVPHYLHGETVSSERF

SEQ ID NO: 30811 - protein, 51 aa, Homo sapiens [sequence omitted]

SEQ ID NO: 30812 - protein, 139 aa, Homo sapiens
MSLKSATKWGRRCNYYYQHLESIMNLLEYFLALTSFILRCSYWIFPSANNMEVPIQGQIIPGFIWSCLKVKSLEFLMIPFLYGLQFDRWEFSTLKKTLLLSGNPCPPLTSTQNCFPHSLTARVVKNWDVLLRWAVECHY

SEQ ID NO: 30813 - protein, 30 aa, Homo sapiens
MDRQWCSGTEQILEGVGRPINQETSEIKVA

SEQ ID NO: 30814 - protein, 41 aa, Homo sapiens
MAKKFYPVNRNLINLIKINVSQMTLRPAGYHRLQMLNAQWR

SEQ ID NO: 30815 - protein, 33 aa, Homo sapiens
MGHCFSNLSQCNTTSAKKSMQRKESPTCHKTVV

SEQ ID NO: 30816 - protein, 415 aa, Homo sapiens
MRELLCSEQGGPADALRSAALPPVPHRSFGWGFRSSPAHTPCGWGAWGRCNGRAWGQDRWEGRGWPASVPGGLTIGVEVTSGPAAHRAQGYHEGPALSSGVSECLGESRPGEDGGTGPALQECIVGTLPPPRPRREGRSLPQSGRCTHLGAPHPCPPERALPLSLGAWPGPPGGPSVSAPKDIRSVRPISLVRPVLPATLSHGIPWPVACRECFSGGVPTPWLICPRLAGDIRSTANLSRSQGRGTHLAFVSSPQALRTQAFQVLLQPLACVLKATVQAPGPPGLLDGTADDATTVDTLLASKSSCAGLLCRTLAHLEELQPLPQRPSPWPQASLLGATVTVLRLCDGSAAPASSVGGHLCGTLAGCVRVQRAALDFLGTLSQGTGPQELVTQALAVLLECLESPGSSPTVRWWG

SEQ ID NO: 30817 - protein, 38 aa, Homo sapiens
MMTAESGRAEDPKSFPRLAENKLPGRRMRRQETNCLES

SEQ ID NO: 30818 - protein, 80 aa, Homo sapiens
MFNHLLVSKVIWVSIFLHPPLKTDLFHTFEMYEKPEIQDPPWPAPFFSPTVLRISQLSFTSLIEITVLMESVCGNERWLP

SEQ ID NO: 30819 - protein, 396 aa, Homo sapiens
MRYVKTLSRENGQKFNAVGENCITDSNPAKHLRGSREESLHPSVSSVENLQQHEDLINLQSFQLGERAYQTDVLVKVPRQSSVLSENQRMNNPERWFESTGCGKTYNQNRAFNQHQRFHSGEKTYEHNECGKAFSWPSILSKHQRIHTGKKLYTCEDCGKSFSVHSYFIQHCKIHTREKPYECIKCGKAFSTHSSYVQHLKIHTGEKHHECNQCGKAFSHSSNLIHHQRIHSGEKPYKCKECGKAFNRQSNLIQHQRIHSGEKPYDCKECGKAFSTQLFLIQHQRIHTGEKPYECNECAKSFSLNRTLTVHQRIHTGEKPYRCNECGKSFSQCSQVIQHKRIHTGEKPYICNECGKSFGARLSLIQHQRIHTGEKPYGCSVCGKTFSQKGHLIQHQ

SEQ ID NO: 30820 - protein, 13 aa, Homo sapiens
MPPFESLALSPRL

SEQ ID NO: 30821 - protein, 8 aa, Homo sapiens
MDLWSWVS

SEQ ID NO: 30822 - protein, 340 aa, Homo sapiens
MKKRKELNALIGLAGDSRRKKPKKGPSSHRLLRTEPPDSDSESSSEEEEEFGVVGNRSRFAKGDYLRCCKICYPLCGFVILAACVVACVGLVWMQVALKEDLDALKEKFRTMESNQKSSFQEIPKLNEELLSKQKQLEKIESGEMGLNKVWINITEMNKQISLLTSAVNHLKANVKSAADLISLPTTVEGLQKSVASIGNTLNSVHLAVEALQKTVDEHKKTMELLQSDMNQHFLKETPGSNQIIPSPSATSELDNKTHSENLKQVLFISGLTPCDHSALQRQPNSLGLVFGVSAGASCIYLPAWELSREECVLVSRGSILLSFPFFGTLQFFPACQSVE

SEQ ID NO: 30823 - protein, 184 aa, Homo sapiens
MALEGMSKRKRKRSVQEGENPDDGVRGSPPEDYRLGQVASSLFRGEHHSRGGTGRLASLFSSLEPQIQPVYVPVPKQTIKKTKRNEEEESTSQIERPLSQEPAKKVKAKKKHTNAEKKLADRLVKFSYLMLKKLDGKLTFLYLEYSSVLFHISTFFQNFYYGKSSTYRKVEKAKKPRVLSISNY

SEQ ID NO: 30824 - protein, 21 aa, Homo sapiens
MRLNFSWIEREARSSACQQPP

SEQ ID NO: 30825 - protein, 62 aa, Homo sapiens
MNHEKYKNSLKIISKASCTTNFLAPLAKVIRDNFGIIEELITTVHAITATEDPGWLLWETVA

SEQ ID NO: 30826 - protein, 21 aa, Homo sapiens
MTKWKYKYKISKNMSNSLLVQ

SEQ ID NO: 30827 - protein, 60 aa, Homo sapiens
MWEAQGETTLGTWTPPVLYIGLGLREGNNQMASLKPAFVNYFFLLLLEVSHLLLIINADV

SEQ ID NO: 30828 - protein, 31 aa, Homo sapiens
MGQDPSLCKASVTVMFQHLIIYPGEFSCLPG

SEQ ID NO: 30829 - protein, 40 aa, Homo sapiens
MGQDPSLCKASVTVMFQVGVHGLCSYRGDLVDNHSMMNTK

SEQ ID NO: 30830 - protein, 72 aa, Homo sapiens
MIKHAEMERTSVLEKQVSLERERQHDQTHVQSQLEKLDLLEQEYNKLTTMQALAEVSACVFLLLTYIRVVFF

SEQ ID NO: 30831 - protein, 75 aa, Homo sapiens
MPRGRRLGMVFAPPRPGQRQAGAPWVPERRKRRPDGDTFLLSFLSTTWLKTWRSQQYKESKSRSCAREQMNSSSC

SEQ ID NO: 30832 - protein, 259 aa, Homo sapiens [sequence omitted]

SEQ ID NO: 30833 - protein, 207 aa, Homo sapiens
MKPVETHSLQMLHTILSTGSPLKAQSYEYVYRCIKSSILLGSISGGTDIISCFMGHNFSLPVYKGEIQARNLGMAVEAWNEEGKAVWGESGELVCTKPIPCQPTHFWNDENGNKYRKAYFSKFPGIWAHGDYCRINPKTGGIVMLGRSDGTLNPNGVRFGSSEIYNIVYAQRQESGSCRQTDHRWKSRGARRCFLEPRDPGSVPGHP

SEQ ID NO: 30834 - protein, 8 aa, Homo sapiens
MEFMQKYE

SEQ ID NO: 30835 - protein, 55 aa, Homo sapiens
MKMSFERCTARNKMFVNSPFTKVDNYCTFLMEKVLFKVLFLIEYYQKGKKNDLNF

SEQ ID NO: 30836 - protein, 57 aa, Homo sapiens
MKMSFERCTARNKMFVNSPFTKVKIKFYKFTCLFIQGKITSYIEYIQKFKHLVVLPC

SEQ ID NO: 30837 - protein, 25 aa, Homo sapiens
MFWVFLFIDYNTFPIKILSCHAEEG

SEQ ID NO: 30838 - protein, 61 aa, Homo sapiens
MSLLLHPAPLGAASVIHALPGPSTHCCECASPEPVKRQLSILETQIIRALPCTEEKGSTRP

SEQ ID NO: 30839 - protein, 29 aa, Homo sapiens
MAPGPQAGKEVSKEEGWRVRRGWQRVRRG

SEQ ID NO: 30840 - protein, 84 aa, Homo sapiens
MVPPSVPSLSPCTRLACKWSGPRQLVGTGRGWWLTATVISVTQLFARPLNVRCRAVLVCLGAHGGRRGGRLTGNTLLSARLRAA

SEQ ID NO: 30841 - protein, 139 aa, Homo sapiens
MYENQQLGKLEPHVFALADVAYYTMLRKRVNQCIVISGESGSGKTQSTNFLIHCLTALSQKGYASGVERTILGAGPVLEVLRSQLVRMQLPLGKRVCYSQFPKEEDAMPWKATGGSTGTHQEAEGEREKGSGERQETLL

SEQ ID NO: 30842 - protein, 105 aa, Homo sapiens
MERKIHWNSWRASLSLESLFCYSLLLLLPFPTPSQAREICVKFTRGVDFNWQAQALLALQEAAEAFLVHLFEDAYLLTLHAGRVTLFPKDVQLARRIRGLEEGLG

SEQ ID NO: 30843 - protein, 28 aa, Homo sapiens
MGQKVLAGTVLFKSAYLLAGVFVWEEVG

SEQ ID NO: 30844 - protein, 356 aa, Homo sapiens
MEERTVTLEIPEVLKRQLEDDCYYINRRKRLVQLPCHTNIITILESYVKHFAISAAFSANERPRHHHAMPHASMNVPYIPAEKNIDLCKEMVDGLRITFDYTLPLVLLYPYEQAQYKKVTASKVFLAIKESATNTNRSQEKLSPSLRLLNPSRPQSTESQSTSGEPATPKRRKAEPQAVQSLRRSSPHTANCDRLSKSSTSPQPKRWQQDMSTSVPKLFLHLEKKTPVHSRSSSPTLTPSQEGSPVFAGFEGRRTNEINEVLSWKLVPDNYPPGDQPPPPSYIYGAQHLLRLFVKLPEILGKMSFTEKNLKALLKHFDLFVRFLAEYHDDFFPESAYVAASEVHYSTRNPQAVNKC

SEQ ID NO: 30845 - protein, 78 aa, Homo sapiens
MPLGVSHDCRPMCVRGVLWESMDPEVPGTSREPSSQMPAKGHLTCFESQFPDTENKGLSADLCPVCPVAPGDVSSRRG

SEQ ID NO: 30846 - protein, 49 aa, Homo sapiens
MPLGVSHDCRPMCVRGVLWESMDPEVPGLSADLCPVCPVAPGDVSSRRG

SEQ ID NO: 30847 - protein, 51 aa, Homo sapiens
MSSLGSHQNKETGLKTLIPESILPHIQNEIHAQRCQEESRQTGLSRICGNI

SEQ ID NO: 30848 - skipped

SEQ ID NO: 30849 - protein, 194 aa, Homo sapiens
MLGPQKRLASSVLRCGKKKVWLDPSETNEIANANSRQQIRKLIKDGLIIRKPVTVHSRARCRKNTLARRKGRHVAIGEQKGTANARMPEKVTWMRRMTILRRLLRRYRESKKIDRHTYHSLYLKVKGNVFKDKRILMEHIHKLKADKARKKLLADQAEARRSKTKEAGKCPEERLQAKKEEFIKTLSKEEETKK

SEQ ID NO: 30850 - protein, 53 aa, Homo sapiens
MFLLRSSSSFPALLLPLQISPPSASDWIKGNHFSKGSLALSFQAILQPPEPST

SEQ ID NO: 30851 - protein, 182 aa, Homo sapiens
MSLKSATKWGRRCNYYYQHLESIMNLLEYFLALTSFILRCSYWIFPSANNMEVPIQGQIIPGFIWSCLKVKSLEFLMIPFLYGLQFDRWEFSTLKKTQFHHVTQAGLALLGSSNSSLPAAALQVLGLQLQGLTFLGLTKEDAVGCESLLPMLKWQVYDTKDAVQQSSHCAQHQYFFLPPSSC

SEQ ID NO: 30852 - protein, 115 aa, Homo sapiens
MQGSKARAKAKTHSSRAGLQFSVGRVHRLLRKGNYAKRVRAGAPVYLEAVLEYLTAKILELAGNAARDKKTRVTPRRLQLAIHDEKLNKLLGKVTIAQGGVLPNIQAVLLPCLYK

SEQ ID NO: 30853 - protein, 672 aa, Homo sapiens
MFPPSGSTGLIPPSHFQARPLSTLPRMAPTWLSDIPLVQPPGHQDVSERRLDTQRPQVTMWERDVSSDRQEPGRRGRSWGLEGSQALSQQAEVIVRQLQELRRLEEEVRLLRETSLQQKMRLEAQAMELEALARAEKAGRAEAEGLRAALAGAEVVRKNLEEGSQRELEEVQRLHQEQLSSLTQAHEEALSSLTSKAEGLEKSLSSLETRRAGEAKELAEAQREAELLRKQLSKTQEDLEAQVTLVENLRKYVGEQVPSEVHSQTWELERQKLLETMQHLQEDRDSLHATAELLQVRVQSLTHILALQEEELTRKVQPSDSLEPEFTRKCQSLLNRWREKVFALMVQLKAQELEHSDSVKQLKGQVASLQEKVTSQSQEQAILQRSLQDKAAEVEVERMGAKGLQLELSRAQEARRRWQQQTASAEEQLRLVVNAVSSSQIWLETTMAKVEGAAAQLPSLNNRLSYAVRKVHTIRGLIARKLALAQLRQESCPLPPPVTDVSLELQQLREERNRLDAELQLSARLIQQEVGRAREQGEAERQQLSKVAQQLEQELQQTQESLASLGLQLEVARQGQQESTEEAASLRQELTQQQELYGQGVEREMGASLGGWGGNCESKLLLICPVCTFTPALQEKVAEVETRLREQLSDTERRLNEARREHAKAGEPCQGG

SEQ ID NO: 30854 - protein, 89 aa, Homo sapiens
MLGSLAPDPGSRRHSGQAALRPRRYPTLWDRCRKRWLRPIFTQLLAAGLAYHTLLPIPSEPLFAAPGEHLHQCFVKESYCPPRVLAKEQ

SEQ ID NO: 30855 - protein, 13 aa, Homo sapiens
MRKRPACHFLIFS

SEQ ID NO: 30856 - protein, 481 aa, Homo sapiens
MGTYGNLLSLGCDSRIEKEEMIPKQDISEELESQRAKSEDHVRNIFKETEEMSKTEGKLENCWRKYAVEGVKNSFSQKSNFREITMRYVKTLSRENGQKFNAVGENCITDSNPAKHLRGSREESLHPSVSSVENLQQHEDLINLQSFQLGERAYQTDVLVKVPRQSSVLSENQRMNNPERWFESTGCGKTYNQNRAFNQHQRFHSGEKTYEHNECGKAFSWPSILSKHQRIHTGKKLYTCEDCGKSFSVHSYFIQHCKIHTREKPYECIKCGKAFSTHSSYVQHLKIHTGEKHHECNQCGKAFSHSSNLIHHQRIHSGEKPYKCKECGKAFNRQSNLIQHQRIHSGEKPYDCKECGKAFSTQLFLIQHQRIHTGEKPYECNECAKSFSLNRTLTVHQRIHTGEKPYRCNECGKSFSQCSQVIQHKRIHTGEKPYICNECGKSFGARLSLIQHQRIHTGEKPYGCSVCGKTFSQKGHLIQHQ

SEQ ID NO: 30857 - protein, 44 aa, Homo sapiens
LKLNGGRHVQGILRGFDPFMNLVIDECVEMATSGQQNNIGMVVI

SEQ ID NO: 30858 - protein, 40 aa, Homo sapiens
LGPNFKRRTPRSCTRYPIECFLLPGRVRKLCVSGDHGYHS

SEQ ID NO: 30859 - protein, 31 aa, Homo sapiens
LLIQLMEKDRCTLLGLEKKTKMSKRDAPSVL

SEQ ID NO: 30860 - protein, 14 aa, Homo sapiens
LLLVTFLSMDDLLG

SEQ ID NO: 30861 - protein, 10 aa, Homo sapiens
TFLSMDDLLG

SEQ ID NO: 30862 - protein, 14 aa, Homo sapiens
IEEMQVSLNFEGNF

SEQ ID NO: 30863 - protein, 54 aa, Homo sapiens
ISATDRICENTSMSRLGIILRHHLASPASHFKVITGSGLPLKGILMLTTSPRRA

SEQ ID NO: 30864 - protein, 526 aa, Homo sapiens
LPDFARSDPRGCPPLRTPLAARARSAARPHRFTMLKALFLTMLTLALVKSQDTEETITYTQCTDGYEWDPVRQQCKDIDECDIVPDACKGGMKCVNHYGGYLCLPKTAQIIVNNEQPQQETQPAEGTSGATTGVVAASSMATSGVLPGGGFVASAAAVAGPEMQTGRNNFVIRRNPADPQRIPSNPSHRIQCAAGYEQSEHNVCQDIDECTAGTHNCRADQVCINLRGSFACQCPPGYQKRGEQCVDIDECTIPPYCHQRCVNTPGSFYCQCSPGFQLAANNYTCVDINECDASNQCAQQCYNILGSFICQCNQGYELSSDRLNCEDIDECRTSSYLCQYQCVNEPGKFSCMCPQGYQVVRSRTCQDINECETTNECREDEMCWNYHGGFRCYPRNPCQDPYILTPENRCVCPVSNAMCRELPQSIVYKYMSIRSDRSVPSDIFQIQATTIYANTINTFRIKSGNENGEFYLRQTSPVSAMLVLVKSLSGPREHIVDLEMLTVSSIGTFRTSSVLRLTIIVGPFSF

SEQ ID NO: 30865 - protein, 61 aa, Homo sapiens
VTMLVATGQCSRCFMFTFSTFSFNCHNSEVDSVRDRLPQDHSAPANSMQLTLTLNTLQLHS

SEQ ID NO: 30866 - protein, 74 aa, Homo sapiens
LEPAGWCPGGLYLCPPLSSLSQALQEAGGPTPPIAPLGYAATSMPRRSRAAVLSKASENQGRPAPPLTRSSAEH

SEQ ID NO: 30867 - protein, 148 aa, Homo sapiens
MTRKLRRRPNDPVPIPDKRRKPAPAQLNYLLTDEQIMEDLRTLNKLKSPKRPASPSSPEHLPATPAESPAQRFEARIEDGKLHYDKRWYHKSQAIYLESKDNQKLSCVISSVGANEIWVRKTSDSTKMRIYLGQLQRGLFVIHRRSAA

SEQ ID NO: 30868 - protein, 15 aa, Homo sapiens
VPSTQRALPVYLLSK

SEQ ID NO: 30869 - protein, 77 aa, Homo sapiens
LKFSGTHLLLPLKNQLQSVMSSLGSHQNKETGLKTLIPESILPHIQNEIHAQRCQEESRQTGLSRLYKKHDASICFW

SEQ ID NO: 30870 - protein, 17 aa, Homo sapiens
MMWRKTTAVSNLVSRAW

SEQ ID NO: 30871 - protein, 16 aa, Homo sapiens
MCLSGGGKTTLIGAEG

SEQ ID NO: 30872 - protein, 4 aa, Homo sapiens
TISG

SEQ ID NO: 30873 - protein, 14 aa, Homo sapiens
ILGPTCCLTIPEPR

SEQ ID NO: 30874 - protein, 4 aa, Homo sapiens
KMPR

SEQ ID NO: 30875 - protein, 22 aa, Homo sapiens
RFSASRMRSFAVHQDLGPSGIS

SEQ ID NO: 30876 - protein, 13 aa, Homo sapiens
MSCPNSAGLQLPA

SEQ ID NO: 30877 - protein, 32 aa, Homo sapiens
RKKREEPLVMPVWWRRRRLRARSWALRAYRLL

SEQ ID NO: 30878 - protein, 91 aa, Homo sapiens
TGPSKRLVPKMFTMGFLKTVLLGTSACVSPPTMPAFFSLPAERRLQAWPQSEAPLSVSSCFQNRPPEPASFQNLRPEPASLQNLRTEPTSF

SEQ ID NO: 30879 - protein, 26 aa, Homo sapiens
LTLYREGRGCLWGFKEFSFAEAFHPS

SEQ ID NO: 30880 - protein, 5 aa, Homo sapiens
MPSVL

SEQ ID NO: 30881 - protein, 6 aa, Homo sapiens
RLKLQV

SEQ ID NO: 30882 - protein, 47 aa, Homo sapiens
RRKRRPDGDTFLLSFLSTTWLKTWRSQQYKESKSRSCAREQMNSSSC

SEQ ID NO: 30883 - protein, 64 aa, Homo sapiens
TEVAAVGGGGVEGRGAQARTNPHVPGRDPDPAAYREAKPAGWAAEPESGTVWSPLELRSGCSAS

SEQ ID NO: 30884 - protein, 65 aa, Homo sapiens
RMKWTQHVKTILSRSLAVKENRECAKEHTDTEQTGHLCNHMEVCLILKLKKLSWKTERPSPDDIV

SEQ ID NO: 30885 - protein, 57 aa, Homo sapiens
VSKLQTTECINETLYMDTRAFKTALPACRAFAVLQRFTGVIALKPRNNFTSDSTRKE

SEQ ID NO: 30886 - protein, 7 aa, Homo sapiens
KNRTFRN

SEQ ID NO: 30887 - protein, 71 aa, Homo sapiens
KRPLLSSAILTFLTYLMKMSFERCTARNKMFVNSPFTKVDNYCTFLMEKVLFKVLFLIEYYQKGKKNDLNF

SEQ ID NO: 30888 - protein, 4 aa, Homo sapiens
VMLP

SEQ ID NO: 30889 - skipped

SEQ ID NO: 30890 - protein, 18 aa, Homo sapiens
IDYNTFPIKILSCHAEEG

SEQ ID NO: 30891 - protein, 1923 aa, Homo sapiens
MDPRQGVIERTGRCQTCAGNMTECPGHFGHIELAKPVFHVGFLVKTMKVLRCVCFFCSKLLVDSNNPKIKDILAKSKGQPKKRLTHVYDLCKGKNICEGGEEMDNKFGVEQPEGDEDLTKEKGHGGCGRYQPRIRRSGLELYAEWKHVNEDSQEKKILLSPERVHEIFKRISDEECFVLGMEPRYARPEWMIVTVLPVPPLSVRPAVVMQGSARNQDDLTHKLADIVKINNQLRRNEQNGAAAHVIAEDVKLLQFHVATMVDNELPGLPRAMQKSGRPLKSLKQRLKGKEGRVRGNLMGKRVDFSARTVITPDPNLSIDQVGVPRSIAANMTFAEIVTPFNIDRLQELVRRGNSQYPGAKYIIRDNGDRIDLRFHPKPSDLHLQTGYKVERHMCDGDIVIFNRQPTLHKMSMMGHRVRILPWSTFRLNLSVTTPYNADFDGDEMNLHLPQSLETRAEIQELAMVPRMIVTPQSNRPVMGIVQDTLTAVRKFTKRDVFLERGEVMNLLMFLSTWDGKVPQPAILKPRPLWTGKQIFSLIIPGHINCIRTHSTHPDDEDSGPYKHISPGDTKVVVENGELIMGILCKKSLGTSAGSLVHISYLEMGHDITRLFYSNIQTVINNWLLIEGHTIGIGDSIADSKTYQDIQNTIKKAKQDVIEVIEKAHNNELEPTPGNTLRQTFENQVNRILNDARDKTGSSAQKSLSEYNNFKSMVVSGAKGSKINISQVIAVVGQQNVEGKRIPFGFKHRTLPHFIKDDYGPESRGFVENSYLAGLTPTEFFFHAMGGREGLIDTAVKTAETGYIQRRLIKSMESVMVKYDATVRNSINQVVQLRYGEDGLAGESVEFQNLATLKPSNKAFEKKFRFDYTNERALRRTLQEDLVKDVLSNAHIQNELEREFERMREDREVLRVIFPTGDSKVVLPCNLLRMIWNAQKIFHINPRLPSDLHPIKVVEGVKELSKKLVIVNGDDPLSRQAQENATLLFNIHLRSTLCSRRMAEEFRLSGEAFDWLLGEIESKFNQAIAHPGEMVGALAAQSLGEPATQMTLNTFHYAGVSAKNVTLGVPRLKELINISKKPKTPSLTVFLLGQSARDAERAKDILCRLEHTTLRKVTANTAIYYDPNPQSTVVAEDQEWVNVYYEMPDFDVARISPWLLRVELDRKHMTDRKLTMEQIAEKINAGFGDDLNCIFNDDNAEKLVLRIRIMNSDENKMQEEEEVVDKMDDDVFLRCIESNMLTDMTLQGIEQISKVYMHLPQTDNKKKIIITEDGEFKALQEWILETDGVSLMRVLSEKDVDPVRTTSNDIVEIFTVLGIEAVRKALERELYHVISFDGSYVNYRHLALLCDTMTCRGHLMAITRHGVNRQDTGPLMKCSFEETVDVLMEAAAHGESDPMKGVSENIMLGQLAPAGTGCFDLLLDAEKCKYGMEIPTNIPGLGAAGPTGMFFGSAPSPMGGISPAMTPWNQGATPAYGAWSPSVGSGMTPGAAGFSPSAASDASGFSPGYSPAWSPTPGSPGSPGPSSPYIPSPGGAMSPSYSPTSPAYEPRSPGGYTPQSPSYSPTSPSYSPTSPSYSPTSPNYSPTSPSYSPTSPSYSPTSPSYSPTSPSYSPTSPSYSPTSPSYSPTSPSYSPTSPSYSPTSPSYSPTSPSYSPTSPSYSPTSPSYSPTSPSYSPTSPSYSPTSPSYSPTSPNYSPTSPNYTPTSPSYSPTSPSYSPTSPNYTPTSPNYSPTSPSYSPTSPSYSPTSPSYSPSSPRYTPQSPTYTPSSPSYSPSSPSYSPTSPTSTPQPVLLTVPAPQSIPQPLPSTHLPVPNIHPPLPSTRLPVPPIHPPPQNTPQHLLLIPQPLQSTPQPLPSTHLLAPLTRPLPPSTRPPAPPTRPPPPKAQPTLPLPLVTRPPAPPTVSQARLSARMTVTRRTEGTWGAAAG

SEQ ID NO: 30892 - protein, 13 aa, Homo sapiens
LTSSILWKSAVVK

SEQ ID NO: 30893 - protein, 42 aa, Homo sapiens
TASSLRPLVMMIKGGGCGLENSHVKTHHLKVLSVRIFMMKFL

SEQ ID NO: 30894 - protein, 55 aa, Homo sapiens
MVQSASVSKAGKGSSSSHGVAAALNQDLDPDPKCHVFNVSSQRCQMGSAQPCLCC

SEQ ID NO: 30895 - protein, 9 aa, Homo sapiens
MGCHPQPLL

SEQ ID NO: 30896 - protein, 239 aa, Homo sapiens
VRDATAATRLAAFLGATPPGDPTRRASSAAPIPLGLLGAALSSVTLYTRKLAGTMGKKQNKKKVEEVLEEEEEEYVVEKVLDRRVVKGKVEYLLKWKGFSDEDNTWEPEENLDCPDLIAEFLQSQKTAHETDKSEGGKRKADSDSEDKGEESKPKKKKEESEKPRGFARGLEPERIIGATDSSGELMFLMKWKNSDEADLVPAKEANVKCPQVVISFYEERLTWHSYPSEDDDKKDDKN

SEQ ID NO: 30897 - protein, 10 aa, Homo sapiens
LRSPVGIPAD

SEQ ID NO: 30898 - protein, 34 aa, Homo sapiens [sequence omitted]

SEQ ID NO: 30899 - protein, 6 aa, Homo sapiens
ITCLMK

SEQ ID NO: 30900 - protein, 11 aa, Homo sapiens
MQSTSNKIAGL

SEQ ID NO: 30901 - protein, 8 aa, Homo sapiens
ISRNLQTS

SEQ ID NO: 30902 - protein, 4 aa, Homo sapiens
VMVE

SEQ ID NO: 30903 - protein, 85 aa, Homo sapiens
IDQSHLRVTLYPSLIPSETASTSPAASGFFMWLQMAGFPKGFWLKHIPWCICTAVSSSLQLCLNRSFTMLSSRFNSMAPNDEISF

SEQ ID NO: 30904 - protein, 25 aa, Homo sapiens
IPLLKVDLFCRKSAVFVLKALEFGI

SEQ ID NO: 30905 - protein, 31 aa, Homo sapiens
MFSSTSTPSSFTAFQTTMRSSIPHWRISRMC

SEQ ID NO: 30906 - protein, 23 aa, Homo sapiens
KVITGSGLPLKGILMLTTSPRRA

SEQ ID NO: 30907 - protein, 15 aa, Homo sapiens
VGRPINQETSEIKVA

SEQ ID NO: 30908 - skipped

SEQ ID NO: 30909 - protein, 26 aa, Homo sapiens
LEDRVKLQKTWGGMAREDAKDWGRGS

SEQ ID NO: 30910 - protein, 35 aa, Homo sapiens
MALSSVAQWSSSEDAKIHEKTSRTSGRIFNGKSLG

SEQ ID NO: 30911 - protein, 19 aa, Homo sapiens
KMPRPGIVAEHPRPAEVPP

SEQ ID NO: 30912 - protein, 20 aa, Homo sapiens
MGKMKSTSCAWSTYSFRSDF

SEQ ID NO: 30913 - protein, 34 aa, Homo sapiens
RKKREEPLVMPVWWRRRRLRARSWALRGARKPLR

SEQ ID NO: 30914 - protein, 86 aa, Homo sapiens
RLVPKMFTMGFLKTVLLGTSACVSPPTMPAFFSLPAERRLQAWPQSEAPLSVSSCFQNRPPEPASFQNLRPEPASLQNLRTEPTSF

SEQ ID NO: 30915 - protein, 38 aa, Homo sapiens
TEVEMKLLHGVKNVFKRKLRERTTEPRINTNRRAMLLD

SEQ ID NO: 30916 - protein, 10 aa, Homo sapiens
IPNKQQSSRN

SEQ ID NO: 30917 - protein, 19 aa, Homo sapiens
LKLQVSKPKCKVDYAKNSQ

SEQ ID NO: 30918 - protein, 15 aa, Homo sapiens
LFLCIQPPSVPVMSL

SEQ ID NO: 30919 - protein, 45 aa, Homo sapiens
KRRPDGDTFLLSFLSTTWLKTWRSQQYKESKSRSCAREQMNSSSC

SEQ ID NO: 30920 - protein, 15 aa, Homo sapiens
LMTLFEPRDPDMPEN

SEQ ID NO: 30921 - protein, 11 aa, Homo sapiens
LNTYIMHWNMT

SEQ ID NO: 30922 - protein, 1935 aa, Homo sapiens
TTEGGRPKLGGLMDPRQGVIERTGRCQTCAGNMTECPGHFGHIELAKPVFHVGFLVKTMKVLRCVCFFCSKLLVDSNNPKIKDILAKSKGQPKKRLTHVYDLCKGKNICEGGEEMDNKFGVEQPEGDEDLTKEKGHGGCGRYQPRIRRSGLELYAEWKHVNEDSQEKKILLSPERVHEIFKRISDEECFVLGMEPRYARPEWMIVTVLPVPPLSVRPAVVMQGSARNQDDLTHKLADIVKINNQLRRNEQNGAAAHVIAEDVKLLQFHVATMVDNELPGLPRAMQKSGRPLKSLKQRLKGKEGRVRGNLMGKRVDFSARTVITPDPNLSIDQVGVPRSIAANMTFAEIVTPFNIDRLQELVRRGNSQYPGAKYIIRDNGDRIDLRFHPKPSDLHLQTGYKVERHMCDGDIVIFNRQPTLHKMSMMGHRVRILPWSTFRLNLSVTTPYNADFDGDEMNLHLPQSLETRAEIQELAMVPRMIVTPQSNRPVMGIVQDTLTAVRKFTKRDVFLERGEVMNLLMFLSTWDGKVPQPAILKPRPLWTGKQIFSLIIPGHINCIRTHSTHPDDEDSGPYKHISPGDTKVVVENGELIMGILCKKSLGTSAGSLVHISYLEMGHDITRLFYSNIQTVINNWLLIEGHTIGIGDSIADSKTYQDIQNTIKKAKQDVIEVIEKAHNNELEPTPGNTLRQTFENQVNRILNDARDKTGSSAQKSLSEYNNFKSMVVSGAKGSKINISQVIAVVGQQNVEGKRIPFGFKHRTLPHFIKDDYGPESRGFVENSYLAGLTPTEFFFHAMGGREGLIDTAVKTAETGYIQRRLIKSMESVMVKYDATVRNSINQVVQLRYGEDGLAGESVEFQNLATLKPSNKAFEKKFRFDYTNERALRRTLQEDLVKDVLSNAHIQNELEREFERMREDREVLRVIFPTGDSKVVLPCNLLRMIWNAQKIFHINPRLPSDLHPIKVVEGVKELSKKLVIVNGDDPLSRQAQENATLLFNIHLRSTLCSRRMAEEFRLSGEAFDWLLGEIESKFNQAIAHPGEMVGALAAQSLGEPATQMTLNTFHYAGVSAKNVTLGVPRLKELINISKKPKTPSLTVFLLGQSARDAERAKDILCRLEHTTLRKVTANTAIYYDPNPQSTVVAEDQEWVNVYYEMPDFDVARISPWLLRVELDRKHMTDRKLTMEQIAEKINAGFGDDLNCIFNDDNAEKLVLRIRIMNSDENKMQEEEEVVDKMDDDVFLRCIESNMLTDMTLQGIEQISKVYMHLPQTDNKKKIIITEDGEFKALQEWILETDGVSLMRVLSEKDVDPVRTTSNDIVEIFTVLGIEAVRKALERELYHVISFDGSYVNYRHLALLCDTMTCRGHLMAITRHGVNRQDTGPLMKCSFEETVDVLMEAAAHGESDPMKGVSENIMLGQLAPAGTGCFDLLLDAEKCKYGMEIPTNIPGLGAAGPTGMFFGSAPSPMGGISPAMTPWNQGATPAYGAWSPSVGSGMTPGAAGFSPSAASDASGFSPGYSPAWSPTPGSPGSPGPSSPYIPSPGGAMSPSYSPTSPAYEPRSPGGYTPQSPSYSPTSPSYSPTSPSYSPTSPNYSPTSPSYSPTSPSYSPTSPSYSPTSPSYSPTSPSYSPTSPSYSPTSPSYSPTSPSYSPTSPSYSPTSPSYSPTSPSYSPTSPSYSPTSPSYSPTSPSYSPTSPSYSPTSPNYSPTSPNYTPTSPSYSPTSPSYSPTSPNYTPTSPNYSPTSPSYSPTSPSYSPTSPSYSPSSPRYTPQSPTYTPSSPSYSPSSPSYSPTSPTSTPQPVLLTVPAPQSIPQPLPSTHLPVPNIHPPLPSTRLPVPPIHPPPQNTPQHLLLIPQPLQSTPQPLPSTHLLAPLTRPLPPSTRPPAPPTRPPPPKAQPTLPLPLVTRPPAPPTVSQARLSARMTVTRRTEGTWGAAAG

SEQ ID NO: 30923 - protein, 13 aa, Homo sapiens
KVLSVRIFMMKFL

SEQ ID NO: 30924 - protein, 38 aa, Homo sapiens
ILIFPTLSVRSPPPLDARAPGESTAGRMVGSTLTIGGN

SEQ ID NO: 30925 - protein, 28 aa, Homo sapiens
MDPEVPGLSADLCPVCPVAPGDVSSRRG

SEQ ID NO: 30926 - protein, 44 aa, Homo sapiens
LTSSTPEFEPYEQWNLGTTKDPDIILSSVIEKRIWDLRRYLLIF

SEQ ID NO: 30927 - protein, 11 aa, Homo sapiens
MGSRRQGPRSF

SEQ ID NO: 30928 - protein, 36 aa, Homo sapiens; identical to SEQ ID NO: 30761

SEQ ID NO: 30929 - protein, 67 aa, Homo sapiens
MELLYWLLEGGDSEDKEDATGNVEMKNIQPLVFEISCDVFQSRCKEHGKIKVLEWFKYVLGIPVYRL

SEQ ID NO: 30930 - protein, 21 aa, Homo sapiens
MELLYWLLEGGDSEDKEVKPV

SEQ ID NO: 30931 - protein, 29 aa, Homo sapiens
MELLYWLLEGGDSEDKEVILSLLKEYFPL

SEQ ID NO: 30932 - protein, 258 aa, Homo sapiens [sequence omitted]

SEQ ID NO: 30933 - protein, 222 aa, Homo sapiens
MDSVAFEDVAVNFTPDEWALLDPSQKNLYREVMQETLRNLASIGKKWKDQNIENEYKNPRSNLRGLMEERLFESEGHQHGEILTQVLDDMLKKKTGVESCERNVCEVSMGHLSLNKHTRADTGHKPYEYQEYGQTPYKCTYCKKAFSCLPYFCRHVIAHTGEKPYECKDSAKTFSFSIYFHSHKRAHSGGNPYECKQSGKPFGCASELQMHARTQCGETLQM

SEQ ID NO: 30934 - protein, 107 aa, Homo sapiens
MGSWSRKRWWPEVNCSENLSPSASFAKLWPQGHMTGAPPSLGRSPHGNEGLTVNPPLILLHLQSNEKRFQSAKDTLSPLPDPCDPRSSCLVTVSPNEPHLNQAPFSP

SEQ ID NO: 30935 - protein, 159 aa, Homo sapiens
MNLLEYFLALTSFILRCSYWIFPSANNMEVPIQGQIIPGFIWSCLKVKSLEFLMIPFLYGLQFDRWEFSTLKKTQFHHVTQAGLALLGSSNSSLPAAALQVLGLQLQGLTFLGLTKEDAVGCESLLPMLKWQVYDTKDAVQQSSHCAQHQYFFLPPSSC

SEQ ID NO: 30936 - protein, 82 aa, Homo sapiens
MHSKRQTITRHSASLSFHALPRSAFLQLCLLRQIHQIPCLSIFSSTLRAQTHDSGIGCTTAKPRRETAGAAQMKKLKPTEMK

SEQ ID NO: 30937 - protein, 26 aa, Homo sapiens
MPGDCLPLAVHSHSREDGIIYNPAHG

SEQ ID NO: 30938 - protein, 50 aa, Homo sapiens
MKLGGDRVSCQFLTATSHQWLHSVSLTQHMAQECLPSVSVSTAAIPRCWS

SEQ ID NO: 30939 - protein, 47 aa, Homo sapiens
MFSPQELTGEGMGQDPSLCKASVTVMFQVFLMTVCLYLTEQLVAIYH

SEQ ID NO: 30940 - protein, 51 aa, Homo sapiens [sequence omitted]

SEQ ID NO: 30941 - protein, 165 aa, Homo sapiens
MPSIKLQSSGGEIFEVDVEIVKQSVTIKTMLEDLGMNDEGDHDPVPLPNVNAAILKKVIQWCTHHEDDSPPPKVYENKEKRTDDIPVWDQEFLKVDQGTLFELILAANYLDIKGLLDVTCKTVANMVNRKTPEEIHKTFNLKNDFTFTEEWEAQVHQENQQCEEK

SEQ ID NO: 30942 - protein, 87 aa, Homo sapiens
MGLTLPSPRLECGGTIMAHCSLELLSSSHPPTSAFRVAGTAGVSHHAWLICLFKFFIETESQLYCPGWKRTSFPPSDNLFQTSQLKN

SEQ ID NO: 30943 - protein, 218 aa, Homo sapiens
MAPRTLLLLLSGALALTLTQTWARSHSMRYFYTTMSRPGRGEPRFISVGYVDDTQFVRFDSDDASPREEPRAPWMEREGPEYWDRNTQICKAQAQTERENLRIALRYYNQSEGGSHTMQVMYGCDVGPDGRFLRGYEQHAYDGKDYIALNEDLRSWTAADMAAQITKRKWEAARRAEQLRAYLEGEFVEWLRRYLENGKETLQRADPPQDTYDPPPHL

SEQ ID NO: 30944 - protein, 421 aa, Homo sapiens
MGASVPTNPPPPLCHSGPPPSGRTELVLSSPHCARPRTGDPSPCPTPSHFDGVCDISCCEVKEGPLRPAPFSCSLLVHVSIFPLVHLSSKQVMVTHAGPLGPPSSSPHSWALLSWSCWMQCPFGPPCRLASHSRPPGLASSASCCSVPVGESPARPPLPLGHPNLSPAQTQRLPLFAPLQTRTSAPRITAAASRTASTRSAVMSANAAVASSSMTTSTTAKKTFMEMDIESQPECAYDHLEVFDGRDAKAPVLGRFCGSKKPEPVLATGSRMFLRFYSDNSVQRKGFQASHATECGGQVRADVKTKDLYSHAQFGDNNYPGGVDCEWVIVAEEGYGVELVFQTFEVEEETDCGYDYMELFDGYDSTAPRLGRYCGSGPPEEVYSAGDSVLVKFHSDDTITKKGFHLRYTSTKFQDTLHSRK

SEQ ID NO: 30945 - protein, 339 aa, Homo sapiens [sequence omitted]

SEQ ID NO: 30946 - protein, 25 aa, Homo sapiens
MLWGTTSLRTKALQLPGIWLLTSHS

SEQ ID NO: 30947 - protein, 197 aa, Homo sapiens [sequence omitted]

SEQ ID NO: 30948 - protein, 59 aa, Homo sapiens
MTAFGLGIPTFLVMQPSGSQPRFPALTQNGVALVRTPLTSVYLRVREPAHMTVWRKFFP

SEQ ID NO: 30949 - protein, 58 aa, Homo sapiens
MTAFGLGIPTFLVMQPSGSQPRFPALTQNGVALVRTPLTSVYLRVRICRVLGPRSQPS

SEQ ID NO: 30950 - protein, 91 aa, Homo sapiens
MTAFGLGIPTFLVMQPSGSQPRFPALTQNGVALVRTPLTSVYLRVRPILPAGLCLGVTLPELAPTTVATVMLMCDCCQEPAHMTVWRKFFP

SEQ ID NO: 30951 - protein, 259 aa, Homo sapiens [sequence omitted]

SEQ ID NO: 30952 - protein, 41 aa, Homo sapiens
MEAGLKFYIRSYLFQWMLWGTTSLRTKALQLPGIWLLTSHS

SEQ ID NO: 30953 - protein, 32 aa, Homo sapiens
MRLTPAGRRDEEGRTAEGPGVSAIKSFEVTVA

SEQ ID NO: 30954 - protein, 4 aa, Homo sapiens
MDHC

SEQ ID NO: 30955 - protein, 15 aa, Homo sapiens
MGPYIVFALSNLPSF

SEQ ID NO: 30956 - skipped

SEQ ID NO: 30957 - protein, 169 aa, Homo sapiens [sequence omitted]

SEQ ID NO: 30958 - protein, 78 aa, Homo sapiens
MQPSGSQPRFPALTQNGVALVRTPLTSVYLRVRPILPAGLCLGVTLPELAPTTVATVMLMCDCCQEPAHMTVWRKFFP

SEQ ID NO: 30959 - protein, 1875 aa, Homo sapiens
MEDIVDLAKKAANDSLLIGGLLRIGYKIENKILAMEEALNWIKYAGDVTILTKLGSIDNCWPMLSIFFTEYKYHITKIVMEDCNLLEELKTQSCMDCIEQGELMKMKGNEEFSKERFDIAIIYYTRAIEYRPENHLLYGNRALCFLRTGQFRNALGDGKRATILKNTWPKGHYRYCDALSMLGEYNWALQANITAQKLCKNDPEGIKDLIQQHVKLQKQIEDLQGRTANKNPIKAFYENRAYTPRSLSAPVFSTSLNFVEKERDFRKINHEMANGGNQNLKVMDEALMVDDCDCHPEFSPPSSQPPKHKGKQKSRNNESEKFSSSSQLTLPADLKNILEKQFSKSSRGAHQDFANIMTMLRSLIQDGYTALLEQRCRSAAHAFTELLNGLDPQKIKQLNLAMINYVLVVYGLAISLLGIGQPEELSEAENQFKRIIEHYHNEGLDCLAYCGIGKVYLKKNRFLEALNHFEKARTLIYRLPGVLTWPTSNVIIEESQPEKIKMLLEKFVEECKFPPVPDAICCYQKCCGYSKIQIYITDPDFKGFIRISCCQYCKIEFHMNCWKKLKTTTFNDKIDKDFLQGICLTPDCEGVISKIIIFSSGGQVKCEFEHKVIKEKVPPRPILKQKCSSLEKLRLKEDKKLKRKIQKKEAKKLAQERMEEDLRESNPPKNEEQKETVDNVQHCQFLDDRILQCIKQYADKIKSGIWNTATLLKELLSWKVLSTEDYTTCFSSRNFLNEAVDYVIRHLIQEKNRVKTRIFLHVLSELKEVEPKLAAWIRKLNSFGLDATGPFFSRYEASLKQLDFSIMTFLWNEKYGHKLDSIEGKQLDYFFEPTSSKEARCLIWLLEEHRDKFPALHSALDEFFDIMDSRCTVLRKQDSGEAPFSSTKVKNKGKKKKPKDSKPMLVGSGTTSVTPNNEIITSSEDHSNQNSDTAGPFAVPDHLRQDVEEFEALYDQHSNEYVVRNKKLWDMNPKQKCSTLYDYFSQLLEEHGPLDMSHKMFSEEYEFFPEETRPILEKAGGLKSFLLGCPRFVVIDNCIALKKVASRLKKKRKKKNIKTKVEDISKAGEYLQVKLPLNSAAREFKPDVKSKPVSGSSSAPASEDVKPKPLSANSPKPACEDVKAKPVSDNSSRQVSEDGKPKGFSSNSPKPGSEDANYKRVSSNSPKPVLEDVKPTYWAQSHLVTGYCTYLPFQRFDNTRTSPAYINVLPGLPQYTSIYTPLVSLSPEYQLPRSVPVVPSFVANDRADKNATAYFEGHHLNAENAAGHQIASETQILEDSSLISVKSQCSTGDAHTVLSESNRKDGHCGNSNNKCEVIPESTSAVTNIPQVQMVAIQVSWNITHQEVNTEPYNPFEKQQGEISRIEKEYQVLQDQLKEAYENYEQIKLKGLEETRDLEEKLKRHLEENKISKTELDWLLQDLEREIKKWQEEKKEIQKTLKSLKKKIKKVSNANEMYTQKNDGNDKEHELHLDQSLEISNTLTNEKMKIEECIKKGKKDYEESHQRAVAAEVSVLENWKESEVYKLQIMQSQAEAYLKKLELISHDPAAYPDMESDICSWELFLSNVTKETEKAKYQFEEQIKAIKNGSRLSELSKVQISELSFPACNTVHPELLPESSGHDDQGFMTSASDVTGNQAALHRDPSVFSAGDSPGEAPSALLPGPPPSQPEATQLPGPKGAGQAALSEQSPAADQKQPVPPGCAACSSQSPKKPFNSIIEHLSVVFPCYNSTELAGFIKKVRSKNKNSLSGLSIDEIVQRVTEHILDEQKKKKPNPGKDKRTYEPSSAAHVTRSSQGPPLAVVAPSPKTKGQKAEDVPVRVALGASSCEICHEVFKSKNVRVLKCGHKYHKGCFKQWLKGQSACPACQTCDLLSEE

SEQ ID NO: 30960 - protein, 41 aa, Homo sapiens
IKPGGPYVGKRVQIRKAPQAVSDTVPERKRSTPMNPANPIR

SEQ ID NO: 30961 - protein, 6 aa, Homo sapiens
MKQEAL

SEQ ID NO: 30962 - protein, 131 aa, Homo sapiens
KNWRGQTIQEKRIVEAANKKEVDYETGDIPTEWEAWIRRTRKTPPTMEEILKNEKHREEIKIKSQDFYEKEKLLSKETSEELLPPPVQTQIKGRASAPYFGKEKPSVAPSSTGKTFQPGSWMPRDGKSHNE

SEQ ID NO: 30963 - protein, 6 aa, Homo sapiens
MKQEAL

SEQ ID NO: 30964 - protein, 29 aa, Homo sapiens
MVKLIFPCSAPLNTTKYLGNYSADNDKGL

SEQ ID NO: 30965 - protein, 74 aa, Homo sapiens
KNLKVKGPVRMPAKTLRITTRKTTCGEDSKTWDHFQMRIHKRLIDLHSPSEIVKQITSISIEPGVEVEVTIADA

SEQ ID NO: 30966 - protein, 31 aa, Homo sapiens
IETESQLYCPGWKRTSFPPSDNLFQTSQLKN

SEQ ID NO: 30967 - protein, 33 aa, Homo sapiens
LALKEMDLEDAEPDVLNYFSKIHQLELLLAAAI

SEQ ID NO: 30968 - protein, 143 aa, Homo sapiens
VTVAKSIDLKDKYKNIGAKLVQDVANNTNEESGDGTTTATVLAGSIAKEGFQKISKGANPVEIRRGVMLAVDAVIAELKKQSKPVTTPEEIAQVAMISANGDKEIGNIISDAMKKVGRKGVITVKDGKTLNDELEIIEGMKFD

SEQ ID NO: 30969 - protein, 78 aa, Homo sapiens
VAEPAENEQDEQDENGAEASADLRADAMAKDRSEEECTTEAEKNERVQKHLKALTSELASARDESKKTANDMIHAENM

SEQ ID NO: 30970 - protein, 70 aa, Homo sapiens
VKGRVRMPTKTLRITTKKTPCGEGSKTWDRFQMRIHKRLIDLHSPSEIVKQITSISIEPGVEVEVTIADA

SEQ ID NO: 30971 - protein, 101 aa, Homo sapiens
MVKKWQTMIEAHVDVRTIDGYLLRLFCVGFTKKRNNQIQKTSYAQHQRVRQIRKKMMEIMTREVQTNALKEVVNKLIPDSIGKDIEKACQSILSMMSSLEK

SEQ ID NO: 30972 - protein, 4 aa, Homo sapiens
LFSP

SEQ ID NO: 30973 - protein, 53 aa, Homo sapiens
LECDISARMLKYRFPAGTMALSSVAQWSSSEDAKIHEKTSRTSGRIFNGKSLG

SEQ ID NO: 30974 - protein, 325 aa, Homo sapiens
KKNKKGKTISLTDFLAEDGGTGGGSTYVSKPVSWADETDDLEGDVSTTWHSNDDDVYRAPPIDRSILPTAPRAAREPNIDRSRLPKSPPYTAFLGNLPYDVTEESIKEFFRGLNISAVRLPREPSNPERLKGFGYAEFEDLDSLLSALSLNEESLSNRRIRVDVADQALDKDRDDPPFGRDRNRDSDKTDTDWRARPATDTFDDYPPRRGDDSFGDKYRDRYDSDRYRDGYRDGPRRDMDRYGGRDRYDDRGSRDYDRGYDSRIGSGRRAFGSGYRRDDDYREGRDCYEDQYDRRDDRSWSSRDDYSRDDYRRDDRGPPPPKDPN

SEQ ID NO: 30975 - protein, 103 aa, Homo sapiens
KGRGHVQPIRCTNCARCVPKDNAIKKFVIRNIVEAAAVRDISEASVFDAYVLPKLCVKLHYCVSCVIHSKVVRNRSREARKDRTPPPRFRPAGAAARPPPKPM

SEQ ID NO: 30976 - protein, 86 aa, Homo sapiens
ISNVKIPKHLTDAYFKKQQLRKPRHQEGNIFDTEKEKYEITEQRKIDQKAVDSQILPKVKAISQLQGYLRSVFALTNGIYPHKLVF

SEQ ID NO: 30977 - protein, 153 aa, Homo sapiens
IVLGSGQVVLGMDMGLREMCVGEKRTVIIPPHLGYGEAGVDGEVPGSAVLVFDIELLELVAGLPEGYMFIWNGEVSPNLFEEIDKDGNGEVLLEEFSEYIHAQVASGKGKLAPGFDAELIVKNMFTNQDRNGDGKVTAEEFKLKDQEAKQDEL

SEQ ID NO: 30978 - protein, 171 aa, Homo sapiens
KRFSGTVRLKSTPHPKFSVCVLGDQQHCDEAKAIDIPHMDIKTLKNLNKNKKLVKKLVKKYDAFLASESLIKQIPRILSPGLNKAGKFPSLLTQNENMVAKVDEVKSTIKFQMKKVLCLAVAVGHVKMTDDELVYNTHLAVNFLGSLLKKNWQNVRALYIKSTMGKPQRLY

SEQ ID NO: 30979 - protein, 458 aa, Homo sapiens
KTHINIVVIGHVDSGKSTTTGHLIYKCGGIDKRTIEKFEKEAAEMGKGSFKYAWVLDKLKAERERGITIDISLWKFETSKYYVTIIDAPGHRDFIKNMITGTSQADCAVLIVAAGVGEFEAGISKNGQTREHALLAYTLGVKQLIVGVNKMDSTEPPYSQKRYEEIVKEVSTYIKKIGYNPDTVAFVPISGWNGDNMLEPSANMPWFKGWKVTRKDGNASGTTLLEALDCILPPTRPTDKPLRLPLQDVYKIGGIGTVPVGRVETGVLKPGMVVTFAPVNVTTEVKSVEMHHEALSEALPGDNVGFKVKNVSVKDVRRGNVAGDSKNDPPMEAAGFTAQVIILNHPGQISAGYAPVLDCHMAHIACKFAELKEKIDRRSGKKLEDGPKFLKSGDAAIVDMVPGKPMCVESFSDYPPLGRFAVRDMRQTVAVGVIKAVDKKAAGAGKVTKSAQKAQKAK

SEQ ID NO: 30980 - protein, 56 aa, Homo sapiens
VCPLVERALPALRGFQPGSFGKPGRLLTGDDTCVGCWHSCYLTREGGDFACDGLPV

SEQ ID NO: 30981 - protein, 164 aa, Homo sapiens
LAQIREEKKRKEEERKKKETDQKKEAVAPVQEESDLEKRRREAEALLQSMGLTPESPIVPPPMSPSSKSVSTPSEAGSQDSGDGAVGSRRGPIKLGMAKITQVDFPPREIVTYTKETQTPVMAQPKKDEEEDDDVVAPKLPIEPEEEKTLKKDEENDSKAPPMS

SEQ ID NO: 30982 - protein, 146 aa, Homo sapiens
VYKGEIQARNLGMAVEAWNEEGKAVWGESGELVCTKPIPCQPTHFWNDENGNKYRKAYFSKFPGIWAHGDYCRINPKTGGIVMLGRSDGTLNPNGVRFGSSEIYNIVYAQRQESGSCRQTDHRWKSRGARRCFLEPRDPGSVPGHP

SEQ ID NO: 30983 - protein, 127 aa, Homo sapiens
RRIHLELRNWTPSAVRELVLDNCKSNDGKIEGLTAEFVNLEFLSLINVGLISVSNLPKLPKLKKLELSENRIFGGLDMLAEKLPNLTRLNLSGNKLKDISTLEPLKKLECLKSLDLFNCEVTNMNDY

SEQ ID NO: 30984 - protein, 21 aa, Homo sapiens
ISCVKEEIQETQTPTHSQKKR

SEQ ID NO: 30985 - protein, 59 aa, Homo sapiens
LTIQNRQAQIEVVPSASALIIKALKEPPETERNRKTLNTVGISLLMRSSTLLDRWSTDP

SEQ ID NO: 30986 - protein, 60 aa, Homo sapiens
KKQKNIKHSGNITFDEIVNLARQMEHRSLARELSGTIKEILGTAQSLWVVMLMAATLMTS

SEQ ID NO: 30987 - protein, 76 aa, Homo sapiens
LYPSLIPSETASTSPAASGFFMWLQMAGFPKGFWLKHIPWCICTAVSSSLQLCLNRSFTMLSSRFNSMAPNDEISF

SEQ ID NO: 30988 - protein, 126 aa, Homo sapiens
KKAARVIIEKYYTRLGNDFHTNKRVCKEIAIIPSKKLRNKIAGYVTHLMKWIQRGPVRGISIKLQEEERERRDNYVPEVSALDQEIIEVDPDTKEMLKLLDFGSLSNLQVTQPTVGMNFKMPRGPV

SEQ ID NO: 30989 - protein, 15 aa, Homo sapiens
MPHSIRNYATAEEVY

SEQ ID NO: 30990 - protein, 11 aa, Homo sapiens
LNNWEMKQEAL

SEQ ID NO: 30991 - protein, 39 aa, Homo sapiens
LICLFKFFIETESQLYCPGWKRTSFPPSDNLFQTSQLKN

SEQ ID NO: 30992 - protein, 87 aa, Homo sapiens
LKTAMSTSHVAEPAENEQDEQDENGAEASADLRADAMAKDRSEEECTTEAEKNERVQKHLKALTSELASARDESKKTANDMIHAENM

SEQ ID NO: 30993 - protein, 35 aa, Homo sapiens
VPSVTEKCCGITSKASPNRPFGALLGVVGLSEFPV

SEQ ID NO: 30994 - protein, 145 aa, Homo sapiens
VLGMDMGLREMCVGEKRTVIIPPHLGYGEAGVDGEVPGSAVLVFDIELLELVAGLPEGYMFIWNGEVSPNLFEEIDKDGNGEVLLEEFSEYIHAQVASGKGKLAPGFDAELIVKNMFTNQDRNGDGKVTAEEFKLKDQEAKQDEL

SEQ ID NO: 30995 - protein, 88 aa, Homo sapiens
IDISNVKIPKHLTDAYFKKQQLRKPRHQEGNIFDTEKEKYEITEQRKIDQKAVDSQILPKVKAISQLQGYLRSVFALTNGIYPHKLVF

SEQ ID NO: 30996 - protein, 22 aa, Homo sapiens
VMLMCDCCQEPAHMTVWRKFFP

SEQ ID NO: 30997 - protein, 6 aa, Homo sapiens
KLEGKA

SEQ ID NO: 30998 - protein, 44 aa, Homo sapiens
VTFIFFLVWICLLMHLFQNPKLHKCVNILRNKMNPTRRMIFSHT

SEQ ID NO: 30999 - protein, 8 aa, Homo sapiens
MFAKISNR

SEQ ID NO: 31000 - protein, 18 aa, Homo sapiens
LAKLTYLGKKVIKQENMR

SEQ ID NO: 31001 - protein, 53 aa, Homo sapiens
LACGTPDRRGCAFPAPGPSRHTRSSPLARANAQDDHHPRVCHHLRLERSFMQG

SEQ ID NO: 31002 - protein, 131 aa, Homo sapiens [sequence omitted]

SEQ ID NO: 31003 - protein, 33 aa, Homo sapiens
ISCDVFQSRCKEHGKIKVLEWFKYVLGIPVYRL

SEQ ID NO: 31004 - protein, 5 aa, Homo sapiens
MMKFL

SEQ ID NO: 31005 - protein, 32 aa, Homo sapiens
LYNNHEIRSGKHIGVCISVANNRLFVGSIPKS

SEQ ID NO: 31006 - protein, 39 aa, Homo sapiens
RAITGASLADIMAKRDQKPEVRKAQREQAIRAAKEAKKG

SEQ ID NO: 31007 - protein, 329 aa, Homo sapiens
IGYNIIWVPMASCDFSIRTYTYADTPDDFQLHNFSLPEEDTKLKIPLIHRALQLAQRPVSLLASPWTSPTRLKTRGAGNGKGPLKGQPRDIYHQTWARYIVKFLDAYAEHKLQFWAVTAENEPSAGLLSGYPFQCLGFTPEHQRDFIARDLGPTLANGTHHNVRLLMLDDQRLLLPHWAKVVLTDPEAAKGLCGFQVLGAECAARLLGSRDAVQPQHHHKPPVPCGRLDRLEPIIVDITKHTFYKQPMFYHLGHFSKFIPEGSQRVGLVASQKNDPDAVALMHPDGSAVVVVLNRSSKDVPLTIKDPAVGFLETISPGYSIHTYLWRRQ

SEQ ID NO: 31008 - protein, 125 aa, Homo sapiens
IPKNDPLNEVHNFNFYLSNVGKDNPQGSFDCVQQTFSSSGASQLNCLGFIQDKITVCATNDSDQMTRERTTQAEEESRNRSTEVIKPGGPYVGKRVQIRKAPQAVSDTVPERKRSTPMNPANPIR

SEQ ID NO: 31009 - protein, 32 aa, Homo sapiens
MPSWFSFNWAPRCLSRRLKGTNNQIQESWTDH

SEQ ID NO: 31010 - protein, 163 aa, Homo sapiens
LFRALWRSLSREVKEHVGTDQFGNKYYYILQNKNWRGQTIQEKRIVEAANKKEVDYETGDIPTEWEAWIRRTRKTPPTMEEILKNEKHREEIKIKSQDFYEKEKLLSKETSEELLPPPVQTQIKGRASAPYFGKEKPSVAPSSTGKTFQPGSWMPRDGKSHNE

SEQ ID NO: 31011 - protein, 32 aa, Homo sapiens; identical to SEQ ID NO: 31009

SEQ ID NO: 31012 - protein, 1235 aa, Homo sapiens
LAWTMVLLWEPAGAWLALGLALALGPSVAAAAPRQDCTGVECPPLENCIEEALEPGACCATCVQQGCACEGYQYYDCLQGGFVRGRVPAGQSYFVDFGSTECSCPPGGGKISCQFMLCPELPPNCIEAVVVADSCPQCGQVGCVHAGHKYAAGHTVHLPPCRACHCPDAGGELICYQLPGCHGNFSDAEEGDPERHYEDPYSYDQEVAEVEAATALGGEVQAGAVQAGAGGPPAALGGGSQPLSTIQAPPWPAVLPRPTAAAALGPPAPVQAKARRVTEDSEEEEEEEEEREEMAVTEQLAAGGHRGLDGLPTTAPAGPSLPIQEERAEAGARAEAGARPEENLILDAQATSRSTGPEGVTHAPSLGKAALVPTQAVPGSPRDPVKPSPHNILSTSLPDAAWIPPTREVPRKPQVLPHSHVEEDTDPNSVHSIPRSSPEGSTKDLIETCCAAGQQWAIDNDECLEIPESGTEDNVCRTAQRHCCVSYLQEKSCMAGVLGAKEGETCGAEDNDSCGISLYKQCCDCCGLGLRVRAEGQSCESNPNLGYPCNHVMLSCCEGEEPLIVPEVRRPPEPAAAPRRVSEAEMAGREALSLGTEAELPNSLPGDDQDECLLLPGELCQHLCINTVGSYHCACFPGFSLQDDGRTCRPEGHPPQPEAPQEPALKSEFSQVASNTIPLPLPQPNTCKDNGPCKQVCSTVGGSAICSCFPGYAIMADGVSCEDQDECLMGAHDCSRRQFCVNTLGSFYCVNHTVLCADGYILNAHRKCVDINECVTDLHTCSRGEHCVNTLGSFHCYKALTCEPGYALKDGECEDVDECAMGTHTCQPGFLCQNTKGSFYCQARQRCMDGFLQDPEGNCVDINECTSLSEPCRPGFSCINTVGSYTCQRNPLICARGYHASDDGTKCVDVNECETGVHRCGEGQVCHNLPGSYRCDCKAGFQRDAFGRGCIDVNECWASPGRLCQHTCENTLGSYRCSCASGFLLAADGKRCEDVNECEAQRCSQECANIYGSYQCYCRQGYQLAEDGHTCTDIDECAQGAGILCTFRCLNVPGSYQCACPEQGYTMTANGRSCKDVDECALGTHNCSEAETCHNIQGSFRCLRFECPPNYVQVSKTKCERTTCHDFLECQNSPARITHYQLNFQTGLLVPAHIFRIGPAPAFTGDTIALNIIKGNEEGYFGTRRLNAYTGVVYLQRAVLEPRDFALDVEMKLWRQGSVTTFLAKMHIFFTTFAL

SEQ ID NO: 31013 - protein, 41 aa, Homo sapiens
IIAWMFRAAIQCEFSKQEFMDGMTELGCDSIEKLKAQIPKM

SEQ ID NO: 31014 - protein, 35 aa, Homo sapiens
VTVSKWKSLLSQQLLCKMPRPGIVAEHPRPAEVPP

SEQ ID NO: 31015 - protein, 30 aa, Homo sapiens
MDPRKVNELQAFVKMCKQDPSVLHTEEMRF

SEQ ID NO: 31016 - protein, 46 aa, Homo sapiens
VTGGGCGCHCTAPTATAAPDLGDHVLPLQKELPFVTRRGRRSTLGP

SEQ ID NO: 31017 - protein, 56 aa, Homo sapiens
TPLTSVYLRVRPILPAGLCLGVTLPELAPTTVATVMLMCDCCQEPAHMTVWRKFFP

SEQ ID NO: 31018 - protein, 424 aa, Homo sapiens
KYLKGKVVTKEKIQEAKDVYKEHFQDDVVNEKGWNYILEKYDGHLPIEIKAVPEGFVIPRGNVLFTVENTDPECYWLTNWIETILVQSWYPITVATNSREQKKILAKYLLETSGNLDGLEYKLHDFGYRGVSSQETAGIGASAHLVNFKGTDTVAGLALNKKYYGTKDPVPGYSVPAAEHSTITAWGKDHEKDAFEHIVTQFSSVPVSVVSNSYDIYNACEKIWGEDLRHLIVSRSTQAPLIIRPDSGNPLDTVLKVLEILGKKFPVTENSKGYKLLPPYLRVIQGDGVDINTLQEIVEGMKQKMWSIENIAFGSGGGLLQKLTRDLLNCSFKCSYVVTNGLGINVFKDPVADPNKRSKKGRLSLHRTPAGNFVTLEEGKGDLEEYGQDLLHTVFKNGKVTKSYSFDEIRKNAQLNIELEAAHH

SEQ ID NO: 31019 - protein, 5 aa, Homo sapiens
KPALQ

SEQ ID NO: 31020 - protein, 6 aa, Homo sapiens
MTSRFS

SEQ ID NO: 31021 - protein, 31 aa, Homo sapiens
MHLFQNPKLHKCVNILRNKMNPTRRMIFSHT

SEQ ID NO: 31022 - protein, 27 aa, Homo sapiens
MSSGEFAIKLAKLTYLGKKVIKQENMR

SEQ ID NO: 31023 - protein, 17 aa, Homo sapiens
RTKALQLPGIWLLTSHS

SEQ ID NO: 31024 - protein, 18 aa, Homo sapiens
VAPHCRFSSFLPPFRKLN

SEQ ID NO: 31025 - protein, 185 aa, Homo sapiens
LAAIVAKQVLLGRKVVVVCCEGINISGNFYRNKLNYLAFLRKRMNTSPSRGPYHFRAPSRVFWRTVRGMLPHKTKRGQAALDRLKVSDGIPPPYDKKKRMVVPAALKVVRLKPTRKFAYLGRLAHEVGWKYQAVTATLEEKRKEKAKIHYRKKKQLMRLRKQAEKNVEKKIDKYTEVLKTHGLLV

SEQ ID NO: 31026 - protein, 8 aa, Homo sapiens
MMVHFFKQ

SEQ ID NO: 31027 - protein, 1962 aa, Homo sapiens
KRVQFGVLSPDELKRMSVTEGGIKYPETTEGGRPKLGGLMDPRQGVIERTGRCQTCAGNMTECPGHFGHIELAKPVFHVGFLVKTMKVLRCVCFFCSKLLVDSNNPKIKDILAKSKGQPKKRLTHVYDLCKGKNICEGGEEMDNKFGVEQPEGDEDLTKEKGHGGCGRYQPRIRRSGLELYAEWKHVNEDSQEKKILLSPERVHEIFKRISDEECFVLGMEPRYARPEWMIVTVLPVPPLSVRPAVVMQGSARNQDDLTHKLADIVKINNQLRRNEQNGAAAHVIAEDVKLLQFHVATMVDNELPGLPRAMQKSGRPLKSLKQRLKGKEGRVRGNLMGKRVDFSARTVITPDPNLSIDQVGVPRSIAANMTFAEIVTPFNIDRLQELVRRGNSQYPGAKYIIRDNGDRIDLRFHPKPSDLHLQTGYKVERHMCDGDIVIFNRQPTLHKMSMMGHRVRILPWSTFRLNLSVTTPYNADFDGDEMNLHLPQSLETRAEIQELAMVPRMIVTPQSNRPVMGIVQDTLTAVRKFTKRDVFLERGEVMNLLMFLSTWDGKVPQPAILKPRPLWTGKQIFSLIIPGHINCIRTHSTHPDDEDSGPYKHISPGDTKVVVENGELIMGILCKKSLGTSAGSLVHISYLEMGHDITRLFYSNIQTVINNWLLIEGHTIGIGDSIADSKTYQDIQNTIKKAKQDVIEVIEKAHNNELEPTPGNTLRQTFENQVNRILNDARDKTGSSAQKSLSEYNNFKSMVVSGAKGSKINISQVIAVVGQQNVEGKRIPFGFKHRTLPHFIKDDYGPESRGFVENSYLAGLTPTEFFFHAMGGREGLIDTAVKTAETGYIQRRLIKSMESVMVKYDATVRNSINQVVQLRYGEDGLAGESVEFQNLATLKPSNKAFEKKFRFDYTNERALRRTLQEDLVKDVLSNAHIQNELEREFERMREDREVLRVIFPTGDSKVVLPCNLLRMIWNAQKIFHINPRLPSDLHPIKVVEGVKELSKKLVIVNGDDPLSRQAQENATLLFNIHLRSTLCSRRMAEEFRLSGEAFDWLLGEIESKFNQAIAHPGEMVGALAAQSLGEPATQMTLNTFHYAGVSAKNVTLGVPRLKELINISKKPKTPSLTVFLLGQSARDAERAKDILCRLEHTTLRKVTANTAIYYDPNPQSTVVAEDQEWVNVYYEMPDFDVARISPWLLRVELDRKHMTDRKLTMEQIAEKINAGFGDDLNCIFNDDNAEKLVLRIRIMNSDENKMQEEEEVVDKMDDDVFLRCIESNMLTDMTLQGIEQISKVYMHLPQTDNKKKIIITEDGEFKALQEWILETDGVSLMRVLSEKDVDPVRTTSNDIVEIFTVLGIEAVRKALERELYHVISFDGSYVNYRHLALLCDTMTCRGHLMAITRHGVNRQDTGPLMKCSFEETVDVLMEAAAHGESDPMKGVSENIMLGQLAPAGTGCFDLLLDAEKCKYGMEIPTNIPGLGAAGPTGMFFGSAPSPMGGISPAMTPWNQGATPAYGAWSPSVGSGMTPGAAGFSPSAASDASGFSPGYSPAWSPTPGSPGSPGPSSPYIPSPGGAMSPSYSPTSPAYEPRSPGGYTPQSPSYSPTSPSYSPTSPSYSPTSPNYSPTSPSYSPTSPSYSPTSPSYSPTSPSYSPTSPSYSPTSPSYSPTSPSYSPTSPSYSPTSPSYSPTSPSYSPTSPSYSPTSPSYSPTSPSYSPTSPSYSPTSPSYSPTSPNYSPTSPNYTPTSPSYSPTSPSYSPTSPNYTPTSPNYSPTSPSYSPTSPSYSPTSPSYSPSSPRYTPQSPTYTPSSPSYSPSSPSYSPTSPTSTPQPVLLTVPAPQSIPQPLPSTHLPVPNIHPPLPSTRLPVPPIHPPPQNTPQHLLLIPQPLQSTPQPLPSTHLLAPLTRPLPPSTRPPAPPTRPPPPKAQPTLPLPLVTRPPAPPTVSQARLSARMTVTRRTEGTWGAAAG

SEQ ID NO: 31028 - protein, 93 aa, Homo sapiens
LAPKIGPLGLSPKNVGGDIAKATGDWKGLRITVKLTIQNRQAQIEVVPSASALIIKALKEPPETERNRKTLNTVGISLLMRSSTLLDRWSTDP

SEQ ID NO: 31029 - protein, 4 aa, Homo sapiens
VLDS

SEQ ID NO: 31030 - protein, 47 aa, Homo sapiens
MFGAAARSADLVLLEKNLQAAHGFIAPVTKGRTAAKKWNLKTLAIVR

SEQ ID NO: 31031 - protein, 39 aa, Homo sapiens
MPPTQLSHCKKTFTVQTTKLAVEETVVRFPCKFTYENGL

SEQ ID NO: 31032 - protein, 37 aa, Homo sapiens
MATPVGVEHGEQSQAFSDDEAFLCLASAETVKSRAPG

SEQ ID NO: 31033 - protein, 63 aa, Homo sapiens
MPFSRTEDGKIYQRAFGGHSLKFGKGGQAHGCCCVADRTGHSILHTLYGRVGLTLLALFFSFF

SEQ ID NO: 31034 - protein, 482 aa, Homo sapiens
MMGTYGNLLSLGCDSRIEKEEMIPKQDISEELESQRAKSEDHVRNIFKETEEMSKTEGKLENCWRKYAVEGVKNSFSQKSNFREITMRYVKTLSRENGQKFNAVGENCITDSNPAKHLRGSREESLHPSVSSVENLQQHEDLINLQSFQLGERAYQTDVLVKVPRQSSVLSENQRMNNPERWFESTGCGKTYNQNRAFNQHQRFHSGEKTYEHNECGKAFSWPSILSKHQRIHTGKKLYTCEDCGKSFSVHSYFIQHCKIHTREKPYECIKCGKAFSTHSSYVQHLKIHTGEKHHECNQCGKAFSHSSNLIHHQRIHSGEKPYKCKECGKAFNRQSNLIQHQRIHSGEKPYDCKECGKAFSTQLFLIQHQRIHTGEKPYECNECAKSFSLNRTLTVHQRIHTGEKPYRCNECGKSFSQCSQVIQHKRIHTGEKPYICNECGKSFGARLSLIQHQRIHTGEKPYGCSVCGKTFSQKGHLIQHQ

SEQ ID NO: 31035 - protein, 461 aa, Homo sapiens
MIPKQDISEELESQRAKSEDHVRNIFKETEEMSKTEGKLENCWRKYAVEGVKNSFSQKSNFREITMRYVKTLSRENGQKFNAVGENCITDSNPAKHLRGSREESLHPSVSSVENLQQHEDLINLQSFQLGERAYQTDVLVKVPRQSSVLSENQRMNNPERWFESTGCGKTYNQNRAFNQHQRFHSGEKTYEHNECGKAFSWPSILSKHQRIHTGKKLYTCEDCGKSFSVHSYFIQHCKIHTREKPYECIKCGKAFSTHSSYVQHLKIHTGEKHHECNQCGKAFSHSSNLIHHQRIHSGEKPYKCKECGKAFNRQSNLIQHQRIHSGEKPYDCKECGKAFSTQLFLIQHQRIHTGEKPYECNECAKSFSLNRTLTVHQRIHTGEKPYRCNECGKSFSQCSQVIQHKRIHTGEKPYICNECGKSFGARLSLIQHQRIHTGEKPYGCSVCGKTFSQKGHLIQHQ

SEQ ID NO: 31036 - protein, 179 aa, Homo sapiens
MVPRTIPGVQETKYLLTGPGAVAHASSQSTGITGGSHRARPGPVHFIDKVTDKPSHSHPFALKENWNLNPEPSSPPSPLFLEAPSRQASQHHGASPGAGTSAGCPFEKCCSTEPCLSGLGDVGRGEAASLRARPGSGASRGQGPGSRVSCRRDLGKPLHAPAGFSAGEVHTTPLGNLGA

SEQ ID NO: 31037 - protein, 510 aa, Homo sapiens
MKLGTVERQGAMGIWKELFCELSPLEFRLYLSNEEHTCVENCSLLRCESVGPAHSDGRFELVFSGKKLALRASSQDEAEDWLDLVREALQKVRPQQEDEWVNVQYSDQPEEPPEAPQGCLSPSDLLSEPAALQGTQSDWSSAQVPELDAIKESLLYLYMDRTWMPYIFSLPLEALKCFRIRNNEKMLSDSHGVETIRDILPDTSLGGPSFFKIITAKAVLKLQAGNAEEAALWRDLVRKVLASYLETAEEAVTLGGSLDENCQEVLKFATRENGFLLQYLVAIPMEKGLDSQGCFCAGCSRQIGFSFVRPKLCAFSGLYYCDICHQDDASVIPARIIHNWDLTKRPICRQALKFLTQIRAQPLINLQMVNASLYEHVERMHLIGRSREQLKLLGDYLGLCRSGALKELSKRLNHRNYLLESPHRFRVADLRQIADEVYEGFLKALIEFASQHVYHCDLCTQRSFICQICQHHDIIFPSEFDTTVRCAKCKTVFHQSCQAVVKKGCPRCAR

SEQ ID NO: 31038 - protein, 162 aa, Homo sapiens [sequence omitted]

SEQ ID NO: 31039 - protein, 63 aa, Homo sapiens [sequence omitted]

SEQ ID NO: 31040 - protein, 27 aa, Homo sapiens
MRIATEVLKSKPNSSHWHTGIRQKAGS

SEQ ID NO: 31041 - protein, 351 aa, Homo sapiens
MDDKLVPDDDYWGKIPKCSLLQPKEVLVFDFGSEVYVWHGKEVTLAQRKIEFQLAKHLWNGTFDYENCDINPLDPGECNPLIRRKGQGRPDWAIFGRLTEHNETILFKEKFLDWTELKRPNEKNPGELAQHKEDSRADVKRNNVTRMVSVPQTTAGAILDRVNIGCGCGLVEGHHRRQFEITSVSVDVWYILEFDYSRLPKQSIGQFHEGDAYVVKWKFMVSTADPGSFNFAPRLFVLSSSSGDFAATEFVYPARAPSVVSSMPFLQEDLYSVPQPVPFLDNHHEVCLWQGWWPIENKITGSARICRASDQKSTMETMLQYCKGKKSQEASPQVLPYPCWSGAPNIHQYVS

SEQ ID NO: 31042 - protein, 39 aa, Homo sapiens
MGMYNRNQSSPPPGDLHFRSLRLPVTPERQTADWPRWGN

SEQ ID NO: 31043 - protein, 39 aa, Homo sapiens
MILPALKLLLFLKYVLLFFSLHVEHYTLLFFRILFFPSG

SEQ ID NO: 31044 - protein, 134 aa, Homo sapiens
MGMYNRNQSSPPPGDLHFRSLRLPVTPERQTADWPSCLKTQPDSDACQPASPTRAAALPTRMGGTTPPRCPRAERSRGSTGIARASALAAGGAGVLRGRDQSAIRAATPDLGRQLSSHCDGHWGAPSILVKFSL

SEQ ID NO: 31045 - protein, 22 aa, Homo sapiens
MIVFAKGDINMGKLRQRSQDMC

SEQ ID NO: 31046 - protein, 45 aa, Homo sapiens
MTAESSGRTCQADCKCCYFHILQGHQSLRRPWAILKCGHLDSPNL

SEQ ID NO: 31047 - protein, 61 aa, Homo sapiens
MQVFNRCFTIKIFSPQVSNIEESLTRLETPVSVAIELPTKLPRLELFGVAHVIAANFGDDG

SEQ ID NO: 31048 - protein, 140 aa, Homo sapiens [sequence omitted]

SEQ ID NO: 31049 - protein, 82 aa, Homo sapiens [sequence omitted]

SEQ ID NO: 31050 - protein, 56 aa, Homo sapiens
MLFVYKQEGKELDPIELNCFCLLVCFLPFSAFQTVFYWMKKLNQENICRFLYMGQY

SEQ ID NO: 31051 - protein, 72 aa, Homo sapiens
MQVFNRCFTIKIFSPQVSNIEESLTRRHRSFMGMYNRNQSSPPPGDLHFRSLRLPVTPERQTADWPRWIKLE

SEQ ID NO: 31052 - protein, 93 aa, Homo sapiens
MQVFNRCFTIKIFSPQVSNIEESLTRRHRSFMGMYNRNQSSPPPGDLHFRSLRLPVTPERQTADWPSAFQTVFYWMKKLNQENICRFLYMGQY

SEQ ID NO: 31053 - protein, 62 aa, Homo sapiens
MGMYNRNQSSPPPGDLHFRSLRLPVTPERQTADWPSAFQTVFYWMKKLNQENICRFLYMGQY

SEQ ID NO: 31054 - protein, 55 aa, Homo sapiens
MGMYNRNQSSPPPGDLHFRSLRLPVTPERQTADWPSCLFLFDFLYKVTLNLLQKE

SEQ ID NO: 31055 - protein, 41 aa, Homo sapiens
MGMYNRNQSSPPPGDLHFRSLRLPVTPERQTADWPRWIKLE

SEQ ID NO: 31056 - protein, 81 aa, Homo sapiens
MGMYNRNQSSPPPGDLHFRSLRLPVTPERQTADWPRKNKAPSPLDGLLQACGCPWPTFNSLEMALLCKSAAGCVRSPRRPA

SEQ ID NO: 31057 - protein, 83 aa, Homo sapiens
MGMYNRNQSSPPPGDLHFRSLRLPVTPERQTADWPRFLTVTELYAIIKCVIRVWKPVSCPYQLPFLSTFPLSSTSVSLFFSAC

SEQ ID NO: 31058 - protein, 38 aa, Homo sapiens
MGMYNRNQSSPPPGDLHFRSLRLPVTPERQTADWPSAC

SEQ ID NO: 31059 - protein, 62 aa, Homo sapiens
MGMYNRNQSSPPPGDLHFRSLRLPVTPERQTADWPRSSLNVTSSREPFQILLLLSPPTPSHK

SEQ ID NO: 31060 - protein, 49 aa, Homo sapiens
MDLHLRHRSFMGMYNRNQSSPPPGDLHFRSLRLPVTPERQTADWPRWGN

SEQ ID NO: 31061 - protein, 43 aa, Homo sapiens
MKNIQPLVFEISCDVFQSRCKEHGKIKVLEWFKYVLGIPVYRL

SEQ ID NO: 31062 - protein, 37 aa, Homo sapiens
MKLTIPVFLFKSLQFIMELLYWLLEGGDSEDKEVKPV

SEQ ID NO: 31063 - protein, 25 aa, Homo sapiens
MPALREAETDGSFEVRSSRPGWPTW

SEQ ID NO: 31064 - protein, 47 aa, Homo sapiens
MSSLGSHQNKETGLKTLIPESILPHIQNEIHAQRCQEESRQTGLSRK

SEQ ID NO: 31065 - protein, 17 aa, Homo sapiens
MFQHLIIYPGEFSCLPG

SEQ ID NO: 31066 - protein, 92 aa, Homo sapiens
MERGRVELGSPCLVGERELTYPQQQLRDDDVGELGRQVEWGAQLWVLYAGVERPVSRMGQKQENGSHVLGLHGGPQLAAQRLLRGAQRRQEQ

SEQ ID NO: 31067 - protein, 34 aa, Homo sapiens
MKCGPVAPHCRFSSFLPPFRKCKLRISNLHRDVF

SEQ ID NO: 31068 - protein, 483 aa, Homo sapiens
MLERHEIHDIQDFYFREMQQNIHDFECQCHNDERNYREIPAIKIKNITGRRDQGDGRNAGNKPVENQLELSFWLHLAELQGFQIERKIYECNQIEKSVTRGSSVSLLQTNLPCVNTSISNIYRNDFMHPSLLTQDQKAYIREKPYKCSDCGKAFNQRSNLTTHQRIHTGQKPHKCDICGKGFRRIANLASHHRIHTGEKPYRCNECGKTFNQTFNLTTHQRIHTGQKPYKCDRCGKGFRQIGNLASHHRIHTGEKPYRCNECGKTFNRMFHLTRHQRIHTGQKPYKCDICGKGFRQIANLASHHRIHTGEKPYKCSDCGKTFNYRSHLTRHQRIHTGQKPYKCDTCGKDFSQNSYLENHQRIHTREKSYRCNECGKTFNKMTNLTTHQRIHTGQKTYKCDICGKGFRQIGNLASHHRIHTGEKPYRCNECGKTFNRMFHLTRHQRIHTGQKPYKCDICGKSFSQNSYLENHQRIHTGEKTYKL

SEQ ID NO: 31069 - protein, 351 aa, Homo sapiens
MRAENGPSEPSQKGKAQSSTLLLHIPPYCSNPRSSGTMEDKRNIQIIEWEHLDKKKFYVFGVAMTMMIRVSVYPFTLIRTRLQVQKGKSLYHGTFDAFIKILRADGITGLYRGFLVNTFTLISGQCYVTTYELTRKFVADYSQSNTVKSLVAGGSASLVAQSITVPIDVVSQHLMMQRKGEKMGRFQVRGNPEGQGVVAFGQTKDIIRQILQADGLRGFYRGYVASLLTYIPNSAVWWPFYHFYAEQLSYLCPKECPHIVFQAVSGPLAAATASILTNPMDVIRTRVQVEGKNSIILTFRQLMAEEGPWGLMKGLSARIISATPSTIVIVVGYESLKKLSLRPELVDSRHW

SEQ ID NO: 31070 - protein, 160 aa, Homo sapiens [sequence omitted]

SEQ ID NO: 31071 - protein, 13 aa, Homo sapiens
MSEESFTHSFVFL

SEQ ID NO: 31072 - protein, 171 aa, Homo sapiens [sequence omitted]

SEQ ID NO: 31073 - protein, 181 aa, Homo sapiens [sequence omitted]

SEQ ID NO: 31074 - protein, 133 aa, Homo sapiens
LAFAYLEDLHSEFDEQHGKKVPTVSRPYSFIEFDTFIQKTKKLYIDSCARRNLGSINTELQDVQRIMVANIEEVLQRGEALSALDSKANNLSSLSKKYRQDAKYLNMHSTYAKLAAVAVFFIMLIVYVRFWWL

SEQ ID NO: 31075 - protein, 43 aa, Homo sapiens
RLNKPVLQTASSMHFPMMLAALKILSDLELYLYGNNRVFLKYN

SEQ ID NO: 31076 - protein, 59 aa, Homo sapiens [sequence omitted]

SEQ ID NO: 31077 - protein, 34 aa, Homo sapiens
MSHLVPMRMKAEVCAFFFFSFLVVCTSLGMEGNK

SEQ ID NO: 31078 - protein, 11 aa, Homo sapiens
LNNWEMKQEAL

SEQ ID NO: 31079 - protein, 21 aa, Homo sapiens
MSHLVPMRMKAEVCAFFFFPS

SEQ ID NO: 31080 - protein, 35 aa, Homo sapiens
VPEPVPVFRSSQHSSWEGGATSLSLNNWEMKQEAL

SEQ ID NO: 31081 - protein, 93 aa, Homo sapiens
LAIRARLKREYLLQYNDPNRQGLIENPALIRWAYARTTNVYPNFRPTPKNSLMGALCGFGPLIFIYYIIKTERDRKEKLMQEGKLDRTVHLSY

SEQ ID NO: 31082 - protein, 102 aa, Homo sapiens
KAQMVQEDLEKTRAELKTAMSTSHVAEPAENEQDEQDENGAEASADLRADAMAKDRSEEECTTEAEKNERVQKHLKALTSELASARDESKKTANDMIHAENM

SEQ ID NO: 31083 - protein, 165 aa, Homo sapiens
IANANSRQQIRKLIKDGLIIRKPVTVHSRARCRKNTLARRKGRHVAIGEQKGTANARMPEKVTWMRRMTILRRLLRRYRESKKIDRHTYHSLYLKVKGNVFKDKRILMEHIHKLKADKARKKLLADQAEARRSKTKEAGKCPEERLQAKKEEFIKTLSKEEETKK

SEQ ID NO: 31084 - protein, 65 aa, Homo sapiens
KSNNVEMDWVLKHTGRNSPDTANDGFVQLRGLPFECSKEEIVQFFSGLEIVPNRITLPVDSRGGV

SEQ ID NO: 31085 - protein, 242 aa, Homo sapiens
VLWTTAQQCPALCLGLGPSCTCCLDPRPAWAWALVLPMTPPERLFLPRVCGTTLHLLLLGLLLVLLPGAQGLPGVGLTPSAAQTARQHPKMHLAHSTLKPAAHLIGDPSKQNSLLWRANTDRAFLQDGFSLSNNSLLVPTSGIYFVYSQVVFSGKAYSPKATSSPLYLAHEVQLFSSQYPFHVPLLSSQKMVYPGLQEPWLHSMYHGAAFQLTQGDQLSTHTDGIPHLVLSPSTVFFGAFAL

SEQ ID NO: 31086 - protein, 39 aa, Homo sapiens
TQNLLFRFRAYSLLAVSCHHVGNRSCRDSHPSAGGEIPG

SEQ ID NO: 31087 - protein, 56 aa, Homo sapiens
RHRLTERACGTCAATTTRARPGLTPSRACTAATWGRTGASSAGMTSTPTTARITSP

SEQ ID NO: 31088 - protein, 37 aa, Homo sapiens
VTKYLNRRGLRRDLNSSCPTNSISAFLLTSCENYSSG

SEQ ID NO: 31089 - protein, 19 aa, Homo sapiens
LGPTCCLTIPEPRWEPWLR

SEQ ID NO: 31090 - protein, 362 aa, Homo sapiens
LVKWQDLSEKVVYRRFTEIYEFHKTLKEMFPIEAGAINPENRIIPHLPAPKWFDGQRAAENHQGTLTEYCSTLMSLPTKISRCPHLLDFFKVRPDDLKLPTDNQTKKPETYLMPKDGKSTATDITGPIILQTYRAIADYEKTSGSEMALSTGDVVEVVEKSESGWWFCQMKAKRGWIPASFLEPLDSPDETEDPEPNYAGEPYVAIKAYTAVEGDEVSLLEGEAVEVIHKLLDGWWVIRKDDVTGYFPSMYLQKSGQDVSQAQRQIKRGAPPRRSSIRNAHSIHQRSRKRLSQDAYRRNSVRFLQQRRRQARPGPQSPGSPLEEERQTQRSKPQPAVPPRPSADLILNRCSESTKRKLASAV

SEQ ID NO: 31091 - protein, 191 aa, Homo sapiens
LSLRTVSLGAGAKDELHIVEAEAMNYEGSPIKVTLATLKMSVQPTVSLGGFETTPPVVLRLKCGSGPVHISGQHLVAVEEDAESEDEEEEDVKLLSISGKRSALGGSSKLPQKKVKLAADEDDDDDEEDDDDEDDDDDFNEEAEEKVPVKQSIQDTPAKNAQKSNQNGKDSKPSTPRSKGQESFKKQEKNS

SEQ ID NO: 31092 - protein, 273 aa, Homo sapiens
VQLGRPQPLVTRVMLFLALGSPWAVELPLCGRRTALCAAAALRGPRASVSRASSSSGPSGPVAGWSTGPSGAARLLRRPGRAQIPVYWEGYVRFLNTPSDKSEDGRLIYTGNMARAVFGVKCFSYSTSLIGLTFLPYIFTQNNAISESVPLPIQIIFYGIMGSFTVITPVLLHFITKGYVIRLYHEATTDTYKAITYNAMLAETSTVFHQNDVKIPDAKHVFTTFYAKTKSLLVNPVLFPNREDYIHLMGYDKEEFILYMEETSEEKRHKDDK

SEQ ID NO: 31093 - protein, 182 aa, Homo sapiens
ISLKNYDPQKDKRFSGTVRLKSTPHPKFSVCVLGDQQHCDEAKAIDIPHMDIKTLKNLNKNKKLVKKLVKKYDAFLASESLIKQIPRILSPGLNKAGKFPSLLTQNENMVAKVDEVKSTIKFQMKKVLCLAVAVGHVKMTDDELVYNTHLAVNFLGSLLKKNWQNVRALYIKSTMGKPQRLY

SEQ ID NO: 31094 - protein, 35 aa, Homo sapiens
KGHSCYRPRRTGERKRKSVRGCIVDANRSALTWLL

SEQ ID NO: 31095 - protein, 115 aa, Homo sapiens [sequence omitted]

SEQ ID NO: 31096 - protein, 19 aa, Homo sapiens
KGRKFERARGRLDNQGHKN

SEQ ID NO: 31097 - protein, 10 aa, Homo sapiens
KILLSVKFLT

SEQ ID NO: 31098 - protein, 314 aa, Homo sapiens
MSLIINTFYSNKEIFLRELISNSSDALDKIWYESLTDPSKLDSGKELHINLIPNKQDQTLTIVDTGIGMTKADLINNLGTIAKSGTKAFMEALQAGADISMIGQFGVSFYSAYLVAEKVTVITKHNDDEQYAWESSAGGSFTVRTDTGERMGRGTKVILHLKEDQTEYLEEQRIKEIVKKHSQLIGYPITLFVEKECDKEVSDDETEEKEDKEEEKEKEEKESKDKPEIEDVGSDEEEEKKDGDKKKKKTKEKYIDQEELNKTKPIWTRNPDDITNEEYGEFCKNLTNDWEDHLAVKHFSVEGQLEFRALLFVP

SEQ ID NO: 31099 - protein, 200 aa, Homo sapiens
IKLYVRRDFIMDNCEELIPEYLNFIRGVVDSEDLPLNISREMLQQSKILKVIRKNLVKKCLELFTELAEDKENCKKFYEQFSKNIKLGIQEDSQNRKKLSELLRYYTSASGDEMVSLKDYCTRMKEKQKHIYYITGETKDQVANSAFVERLGKHGLEVIYMIEPIDEYCVQQLKEFEGKTLVPVTKEGLELPEDEEKKKK

SEQ ID NO: 31100 - skipped

SEQ ID NO: 31101 - protein, 370 aa, Homo sapiens
VTVAKSIDLKDKYKNIGAKLVQDVANNTNEETGDGPTTATVLARSIAKEGIEKISKGANPVEIRRGVMLVVDAVIAELKKQSKPVTTPEEIAQVATISANGDKEIGNISDAMKKVGRKGVITVKDGKTLNDELEIIEGIKFDRGYISPYFINTSKGQKCEFQDAYVLLSEKKISSVQSVVPALEIANAHRKPLVIIAEDVDGEALSTLVLNRLKVGLQDVAIKAPGFGDNRKNQLKDMAIATGGAVFGEEGLTLNLEDVQPHDLGNVGEVIVTKDDATLLKEKGDKAQIEKRIQEIIEQLDVTTSEYEKEKLNERLAKLSDVVAVLKVGGTSDVEVNEKKDRVRMPLMLQELLLKKALYWEGVVPCFDAF

SEQ ID NO: 31102 - protein, 203 aa, Homo sapiens [sequence omitted]

SEQ ID NO: 31103 - protein, 254 aa, Homo sapiens
KKIFVGGIKEDTEEYNLRDYFEKCSKIETIEVMEDRQSGKKRGFAFVTFDDHDIIDKIVVQKYHTINGHNCEVKKALSKQEMQSAGSQRGHGGGSGNFMGRGGNFGGAGGNFGLGGNFGGRGGYGGGGGGSRGSYGRGDGGYNRFGRDGGNYGGGPGYSSRGGYGGGGTGYGNQGGGYGGGGGGYDGYNEGGNFGGGNYGGGGNYNDFGNHSGQQQSNYGPMKGGSFGGRSSGSPYGGGYGSGGGSGGYGSRRF

SEQ ID NO: 31104 - protein, 130 aa, Homo sapiens
IDVVYNASNNELVRTKTVVKNCIVLIDSTPYRQWYESHCALPLGRKKGAKLTPEEEEILNKKRSKKIQKKYDERKKNAKMSSLLGEQFQQGKLLACMASRPGQCGRADGYVLEGKELEFYLRKIKAQKGK

SEQ ID NO: 31105 - protein, 259 aa, Homo sapiens
MPKKRQALVEFEDVLGACNAVSYAADNQIYIAGHPAFVNYSTSQKISLPGDSDDSRSVNSVLLFTILNPIYSITTDVLYTICNPCGPVQRIIIFRKNGVQAMVEFDSVQSAQRAKASLNGAGIYSGCCTLKMEYAKPTRLNVFKNDQDTWDYTNPNLSGQGDPGSNPNKRQRQPPLLGDHPAEYGGPHGGYHSHYHDEGHGPPRPHYEGRRMGPPVGGHCRGPSRYGPPVWAPPTPSPTTRVWPSRRQPCARGLRLASI

SEQ ID NO: 31106 - protein, 142 aa, Homo sapiens
KLSLKRGEEGNMDMKRRIHLELRNWTPSAVRELVLDNCKSNDGKIEGLTAEFVNLEFLSLINVGLISVSNLPKLPKLKKLELSENRIFGGLDMLAEKLPNLTRLNLSGNKLKDISTLEPLKKLECLKSLDLFNCEVTNMNDY

SEQ ID NO: 31107 - protein, 464 aa, Homo sapiens
MTPWNQGATPAYGAWSPSVGSGMTPGAAGFSPSAASDASGFSPGYSPAWSPTPGSPGSPGPSSPYIPSPGGAMSPSYSPTSPAYEPRSPGGYTPQSPSYSPTSPSYSPTSPSYSPTSPNYSPTSPSYSPTSPSYSPTSPSYSPTSPSYSPTSPSYSPTSPSYSPTSPSYSPTSPSYSPTSPSYSPTSPSYSPTSPSYSPTSPSYSPTSPSYSPTSPSYSPTSPSYSPTSPNYSPTSPNYTPTSPSYSPTSPSYSPTSPNYTPTSPNYSPTSPSYSPTSPSYSPTSPSYSPSSPRYTPQSPTYTPSSPSYSPSSPSYSPTSPTSTPQPVLLTVPAPQSIPQPLPSTHLPVPNIHPPLPSTRLPVPPIHPPPQNTPQHLLLIPQPLQSTPQPLPSTHLLAPLTRPLPPSTRPPAPPTRPPPPKAQPTLPLPLVTRPPAPPTVSQARLSARMTVTRRTEGTWGAAAG

SEQ ID NO: 31108 - protein, 73 aa, Homo sapiens
KATGDWKGLRITVKLTIQNRQAQIEVVPSASALIIKALKEPPETERNRKTLNTVGISLLMRSSTLLDRWSTDP

SEQ ID NO: 31109 - protein, 388 aa, Homo sapiens
KVVVCDNDTGFVKCGYAGSNFPEHIFPALVGRSIIRSTTKVGNIEIKDLMVGDEASELRSMLEVNYPMENGIVRNWDDTKHLWDYTFGPEKPNIDTRNCKILLTEPLMNPTKNREKMVEVMFETYQFSGVYVAIQAVLTLYARGLLTAVVVDSGDGVTHIYPVLEGFSLPHLTRRLDIAGRDITRYLIKLLLLQGYTFNHSADFETVRMIKEKLCYVGYNIVQEQKLALETTVLVESYTLPDGGIIKVGGERFETPEALFQPHLINVEGVGVAELLFNTIQAADIDTRSEFYKHIVLSGGSTMYPGLSSRLKRELKQLYLERVLKDDAEKLPKFKICIEDPSRRKHMVFLGGAVLADIMKDKDNFWMTRQEYQEKGVLVLEKLGVTVR

SEQ ID NO: 31110 - protein, 79 aa, Homo sapiens
VSGSPGQSVTISCTGTSSDVGSYDYVSWYQQHPGTVPKPMIYNVNTQPSGVPDRFSGSKSGNTASMTISGLQAEDEADY

SEQ ID NO: 31111 - protein, 115 aa, Homo sapiens
KSAPSTGGVKKPHRYRPGTVALREIRHYQKSTELLIRKLPFQRLVREIAQDFKTDLRFQRAAIGTLQEASEAYLVGLFEDTNLCAIHATRVTIMPKDIQLARHIRGERVSEYTMM

SEQ ID NO: 31112 - protein, 129 aa, Homo sapiens
MSTGEKGFGYKGSCFHRIIPGFMCRGGDFTHHNGTGGKSVHQEKFDDENFILKHTGPGILSTANAGPNTNCSWFFISIAKTESLDGQHVVFGNMKEGMNVVEAMEPFGFRNGKTSKKITIADCGQLQQI

SEQ ID NO: 31113 - protein, 36 aa, Homo sapiens
MKTSMMSHLHLMTVSHWPATCSRYSCAGCGTPHLCS

SEQ ID NO: 31114 - protein, 32 aa, Homo sapiens
MSSARLSRSTSTRALSLVSWSTCRRSSRISSS

SEQ ID NO: 31115 - protein, 9 aa, Homo sapiens
MRKEKIKGF

SEQ ID NO: 31116 - protein, 13 aa, Homo sapiens
MRRAREARPSKKK

SEQ ID NO: 31117 - protein, 12 aa, Homo sapiens
MTHPTTFPGASN

SEQ ID NO: 31118 - protein, 130 aa, Homo sapiens
MNDEGDHDPVPLPNVNAAILKKVIQWCTHHEDDSPPPKVYENKEKRTDDIPVWDQEFLKVDQGTLFELILAANYLDIKGLLDVTCKTVANMVNRKTPEEIHKTFNLKNDFTFTEEWEAQVHQENQQCEEK

SEQ ID NO: 31119 - protein, 77 aa, Homo sapiens
MKTTIKETSTLSNSYLVSINCLTYLMKMSFERCTARNKMFVNSPFTKVDNYCTSSWKKFYLKCYFSLNTIKKEKKMT

SEQ ID NO: 31120 - protein, 222 aa, Homo sapiens
MEDRQSGKKRGFAFVTFDDHDIIDKIVVQKYHTINGHNCEVKKALSKQEMQSAGSQRGHGGGSGNFMGRGGNFGGAGGNFGLGGNFGGRGGYGGGGGGSRGSYGRGDGGYNRFGRDGGNYGGGPGYSSRGGYGGGGTGYGNQGGGYGGGGGGYDGYNEGGNFGGGNYGGGGNYNDFGNHSGQQQSNYGPMKGGSFGGRSSGSPYGGGYGSGGGSGGYGSRRF

SEQ ID NO: 31121 - protein, 80 aa, Homo sapiens
MDSQEHSDCINKGHRLFLSRLSFSLCHTSGAKLCRLGLFWDFLVYQGVLSVFCVWDISKCICQQQKKTNKNAGWMLKDKK

SEQ ID NO: 31122 - protein, 58 aa, Homo sapiens
MWFQNWSLPSPADSGLGDDTVFFLQSPWNRLTAYDLIGDLYMGPTPIFPQETHTLIKG

SEQ ID NO: 31123 - protein, 46 aa, Homo sapiens
MPKVTEDPATISCSPWKPLDSSVMSPVIQQPWPSFDGLNIWSSLNK

SEQ ID NO: 31124 - protein, 44 aa, Homo sapiens [sequence omitted]

SEQ ID NO: 31125 - protein, 41 aa, Homo sapiens
MSRLGIILRHHLASPASHFKMQSVHMRRDFPLSPSSVISLP

SEQ ID NO: 31126 - protein, 127 aa, Homo sapiens
MDTVDIANNSTLGKPKRKRRKKRGHGWSRMRMRRQENSQQNDNSKADGQVVSSEKKANVNLKDLSKIRGRKRGKPGTRFTQSDRAAQKRVRSRGKKENRNELSITKHLISCAVHCTFSNKPISLIVL

SEQ ID NO: 31127 - protein, 283 aa, Homo sapiens
MNVPYIPAEKNIDLCKEMVDGLRITFDYTLPLVLLYPYEQAQYKKVTASKVFLAIKESATNTNRSQEKLSPSLRLLNPSRPQSTESQSTSGEPATPKRRKAEPQAVQSLRRSSPHTANCDRLSKSSTSPQPKRWQQDMSTSVPKLFLHLEKKTPVHSRSSSPTLTPSQEGSPVFAGFEGRRTNEINEVLSWKLVPDNYPPGDQPPPPSYIYGAQHLLRLFVKLPEILGKMSFTEKNLKALLKHFDLFVRFLAEYHDDFFPESAYVAASEVHYSTRNPQAVNKC

SEQ ID NO: 31128 - protein, 47 aa, Homo sapiens
MPLGVSHDCRPMCVRGVLWESMDPEVPGKQVPVPHYLHGETVSSERF

SEQ ID NO: 31129 - protein, 44 aa, Homo sapiens
MPLGVSHDCRPMCVRGVLWESMDPEVPGKWGPAQSSRAQVLCRL

SEQ ID NO: 31130 - protein, 386 aa, Homo sapiens [sequence omitted]

SEQ ID NO: 31131 - protein, 267 aa, Homo sapiens [sequence omitted]

SEQ ID NO: 31132 - protein, 43 aa, Homo sapiens
MNLQKPVKKSLKMLSLFQSEISPRPMNKTGSCPEYTPKLQAPA

SEQ ID NO: 31133 - protein, 129 aa, Homo sapiens [sequence omitted]

SEQ ID NO: 31134 - protein, 141 aa, Homo sapiens
MCQARIALDRSSPSWNSYGTLAPETTNSSLKFSNSNNGISDLAFLYFSHVNKIGSASTMGYMLSYRVSLCRPGWSAVARDLGSLQAPPPGFTPFSCLSLLSSWDYRRPPPHPGTKPIRRCQKIRIFVLMLHLPAVPQCSTS

SEQ ID NO: 31135 - protein, 126 aa, Homo sapiens
MCQARIALDSSPSWNSYGTLAPETTNSSLKFSNSNNGISDLAFLYFSHVNKIGSASTMGYMLSYRVSLCRPGWSAVARDLGSLQAPPPGFTPFSCLSLLSSWDYRRPPPHPGIQLAVCYHMCYTCC

SEQ ID NO: 31136 - protein, 127 aa, Homo sapiens
MCQARIALDRSSPSWNSYGTLAPETTNSSLKFSNSNNGISDLAFLYFSHVNKIGSASTMGYMLSYRVSLCRPGWSAVARDLGSLQAPPPGFTPFSCLSLLSSWDYRRPPPHPGIQLAVCYHMCYTCC

SEQ ID NO: 31137 - protein, 285 aa, Homo sapiens
MSHRKFSTPRHGSLGFLPWKRSSRHRGKVKSFPKDDPSKPVHLTAFLGYKAGMTHIVREVDRPGSKVNKKEVVEAVTIVERPPVGIVGCVETPQGFRTCKTVFAEHISDECKRHFYKNWHKSKKKAFTKYCKKWQDEDGKKQLEKDFSSMKKYCQVICVIAHTQMQLLPLCQKKAHLMEIQVNGGTVAEKLDWAGERLKHQVPVNQVFGQDEMIDVIRVTKGKGYKRVTSRWHTKKLPRKTHQGLCKVACIGAWHPARVGFSVVRGGQKGYHHRTEINKKIYRIG

SEQ ID NO: 31138 - protein, 154 aa, Homo sapiens [sequence omitted]

SEQ ID NO: 31139 - protein, 19 aa, Homo sapiens
MLAVPVTCGDTARSALQIY

SEQ ID NO: 31140 - protein, 15 aa, Homo sapiens
MVILLGWAVDLIRIY

SEQ ID NO: 31141 - protein, 9 aa, Homo sapiens
LEVDLVLGP

SEQ ID NO: 31142 - protein, 47 aa, Homo sapiens
KLSLKLNGGRHVQGILRGFDPFMNLVIDECVEMATSGQQNNIGMVVI

SEQ ID NO: 31143 - protein, 73 aa, Homo sapiens
ICPGLECFPEWLELEPGTRSSLIEVQFMCLWVWMAQSVSGLRKADLAPTLTLTDPGIYSRNWKPSATGAWRSS

SEQ ID NO: 31144 - protein, 42 aa, Homo sapiens
MESRPPPPPPPPPPPPPSPPLTQDHFRNQLAFSPCLGQRFHF

SEQ ID NO: 31145 - protein, 6 aa, Homo sapiens
LNIYES

SEQ ID NO: 31146 - protein, 102 aa, Homo sapiens
IGYNIIWVPMASCDFSIRTYTYADTPDDFQLHNFSLPEEDTKLKIPLIHRALQLAQRPVSLLASPWTSPTRLKTRGAGNGKGPLKGQPRDIYHQTWARYIVK

SEQ ID NO: 31147 - protein, 226 aa, Homo sapiens
LIHRALQLAQRPVSLLASPWTSPTRLKTRGAGNGKGPLKGQPRDIYHQTWARYIVKFLDAYAEHKLQFWAVTAENEPSAGLLSGYPFQCLGFTPEHQRDFIARDLGPTLANGTHHNVRLLMLDDQRLLLPHWAKVVLTDPEAAKYVHGIAVHWYLDFLAPAKATLRETHHLFPNTMLFASEACVGSKFWEQSVRLGSWDRGMQYSHSIITNLLYHVVGWTDWNPSL

SEQ ID NO: 31148 - protein, 42 aa, Homo sapiens
LNKPVLQTASSMHFPMMLAALKILSDLELYLYGNNRVFLKYN

SEQ ID NO: 31149 - protein, 6 aa, Homo sapiens
MDGPFI

SEQ ID NO: 31150 - protein, 33 aa, Homo sapiens
LGALWMCRRVGLPFYRPFAELRGQSRRQSRKQP

SEQ ID NO: 31151 - protein, 7 aa, Homo sapiens
LDPQPGA

SEQ ID NO: 31152 - protein, 9 aa, Homo sapiens
MLTTSPRRA

SEQ ID NO: 31153 - protein, 53 aa, Homo sapiens
ILLLLLLLLLGSRCNFPSASLLLCLGTAKAWDRPRAASLCLPSSPRSIFPPLN

SEQ ID NO: 31154 - protein, 55 aa, Homo sapiens
VPEPVPVFRSSQHSSWEGGATSLSLTSKVDQQRLQSPASFPTLMNCILKRTLSDW

SEQ ID NO: 31155 - protein, 47 aa, Homo sapiens
MSPVIQQPRPSFDGLNIWSSLNSLYIGNLPASIHIPTSVCIPRITGR

SEQ ID NO: 31156 - protein, 33 aa, Homo sapiens
LGALWMCRRVGLPFYRPFAELRGQSRRQSRMQP

SEQ ID NO: 31157 - protein, 372 aa, Homo sapiens
RSLRRYGELANTPFGLFLPPCFCVPWECCCAYASGLFLELQWTGICDSTMGLSNILFVMAFLLSGAAPLKIQAYFNETADLPCQFANSQNQSLSELVVFWQDQENLVLNEVYLGKEKFDSVHSKYMGRTSFDSDSWTLRLHNLQIKDKGLYQCIIHHKKPTGMIRIHQMNSELSVLANFSQPEIVPISNITENVYINLTCSSIHGYPEPKKMSVLLRTKNSTIEYDGVMQKSQDNVTELYDVSISLSVSFPDVTSNMTIFCILETDKTRLLSSPFSIELEDPQPPPDHIPWITAVLPTVIICVMVFCLILWKWKKKKRPRNSYKCGTNTMEREESEQTKKREKIHIPERSDEAQRVFKSSKTSSCDKSDTCF

SEQ ID NO: 31158 - protein, 142 aa, Homo sapiens
IIEMMPEFQKSSVRIKNLTRVEEMICGLIKGGAAKLQIITDFDMTLSRFSYKGKRCPTCHNSIDNCQLITDECRKKLLQLKKKYYAIEVDPVLTVEEKYPYMVEWYTKSHGLLVQQALPKAKLKEIVAESDVMLKERYEEFL

SEQ ID NO: 31159 - protein, 58 aa, Homo sapiens
LSSLSQALQEAGGPTPPIAPLGYAATSMPRRSRAAVLSKASENQGRPAPPLTRSSAEH

SEQ ID NO: 31160 - protein, 44 aa, Homo sapiens
VLHIPASPSSRPHSQAPSQLPRAGRAALISKMLLKAHGHDCTPH

SEQ ID NO: 31161 - protein, 43 aa, Homo sapiens
LKSAVGGEGPGHTPSPPDSSPSGSAQPWTLDLDKKREAALWWI

SEQ ID NO: 31162 - protein, 73 aa, Homo sapiens
KSETPSQKKKNMAETRKLRDGATAPLLPACVRKVSLRGAPAPASGGEGGTCRGRSSEALGPLCSPAIARAALT

SEQ ID NO: 31163 - protein, 137 aa, Homo sapiens
RASAPMLLRMSEHRNEALGNYLEMRLKSSFLRGLGSWKSNPLRLGGWTILLTLTMGQGEPGGPQGDPWVPHELLLPSLCDSSHASSWGSGSITCAWRGGDSSSHPLVSGHILSNSPVAAVMCSSMGTHLSPFKGTLL

SEQ ID NO: 31164 - protein, 181 aa, Homo sapiens
TSPTSRSPRRSQRCPTPLARPPAASPGSALSCPPTRPRPSAPAAATAATPPAATATATAPGIAFGTAPAPAPAAAPLGTVPAPTSWRLGCSCPKSTRLPTCAPRPATTCTPPSWRPARRRSPWSRSTRWARYWAAAASARSTQASASPTTCRWPSNTWRRTGFPTGESCLMALECPWKWSC

SEQ ID NO: 31165 - protein, 42 aa, Homo sapiens
LIIAWMFRAAIQCEFSKQEFMDGMTELGCDSIEKLKAQIPKM

SEQ ID NO: 31166 - protein, 33 aa, Homo sapiens
LNRRGLRRDLNSSCPTNSISAFLLTSCENYSSG

SEQ ID NO: 31167 - protein, 42 aa, Homo sapiens
LTLLTVRVAVCPLIEARLSWKFQSCNDFWLVPRGLLDCCVKS

SEQ ID NO: 31168 - protein, 30 aa, Homo sapiens
KKTIQKKALRFTNMKIKHVILDYVPFCYYF

SEQ ID NO: 31169 - protein, 25 aa, Homo sapiens
VSANPASLCGGLCHRAMGPEVPGPG

SEQ ID NO: 31170 - protein, 57 aa, Homo sapiens
TKDLESASPFLRSVSGRRKSPNMFSRFASPTRKLATCRVLEVETIWGLLAAVQQIYL

SEQ ID NO: 31171 - protein, 15 aa, Homo sapiens
VDSCSWGVRSRSSPA

SEQ ID NO: 31172 - protein, 21 aa, Homo sapiens
LQKDKYRIRVWEKPRGLVSII

SEQ ID NO: 31173 - protein, 141 aa, Homo sapiens
KEAVAPVQEESDLEKRRREAEALLQSMGLTPESPIVPPPMSPSSKSVSTPSEAGSQDSGDGAVGSRRGPIKLGMAKITQVDFPPREIVTYTKETQTPVMAQPKKDEEEDDDVVAPKLPIEPEEEKTLKKDEENDSKAPPMS

SEQ ID NO: 31174 - protein, 105 aa, Homo sapiens
KSLKLLGFLDVENTPCARHSILYGSLGSVVAGFGHFLFTSRIRRSCDVGVGGFILVTLGCWFHCRYNYARQRIQERIAREEIKKKILYEGTHLDPERKHNGGSSN

SEQ ID NO: 31175 - protein, 49 aa, Homo sapiens
LVRVFLNSVLMASASEKSTESCRSRTPGTLLRRRTAEERVAYTPPGDEA

SEQ ID NO: 31176 - protein, 5 aa, Homo sapiens
MRAWV

SEQ ID NO: 31177 - protein, 49 aa, Homo sapiens
RSRGTTVGQAAWKISAGSPRQNSHAPGQAVPTAWWRGNLTSGRAPLLHS

SEQ ID NO: 31178 - protein, 12 aa, Homo sapiens
LRGTLLGCWGQH

SEQ ID NO: 31179 - protein, 5 aa, Homo sapiens
RKKSS

SEQ ID NO: 31180 - protein, 9 aa, Homo sapiens
ITDLAKLAS

SEQ ID NO: 31181 - protein, 335 aa, Homo sapiens
IEGCEVIWAIKDKAIGNTFFDAGAAEFLTSKLIAEKSEAKIAYKRTRYTTEGRKKEARSKSKSDNVGSALGPDWHEGLNLKGTKEFSHKIHLEAMCEVKKIYLQDEFRILKKKSFTFPRDHTSVTTNTEMWPVYVELTNEKIYGCDFIVSATGVTPNIEPFLHGNSFDLGEDGGLKVDDHMHTSLPDIYAAGDICTTSWQLSPVWQQMRLWTQARQMGWYAAKCMAAASSGDSIDMDFSFELFAHVTKFFNYKVVLLGKYNAQGLGSDHELMLRCTKGQEYIKVVMQNGRMMGAFLIGETDLEETFENLILNQMNLSSYGEDLLDPNIDIEDYFD

SEQ ID NO: 31182 - protein, 67 aa, Homo sapiens
MVFAPPRPGQRQAGAPWVPERRKRRPDGDTFLLSFLSTTWLKTWRSQQYKESKSRSCAREQMNSSSC

SEQ ID NO: 31183 - protein, 258 aa, Homo sapiens
ICIQRQVPPVPAARAPQSRTRSAQAKLALTMPVKGGTKCIKYLLFGFNFIFWLAGIAVLAIGLWLRFDSQTKSIFEQETNNNNSSFYTGVYILIGAGALMMLVGFLGCCGAVQESQCMLGLFFGFLLVIFAIEIAAAIWGYSHKDEVIKEVQEFYKDTYNKLKTKDEPQRETLKAIHYALNCCGLAGGVEQFISDICPKKDVLETFTVKSCPDAIKEVFDNKFHIIGAVGIGIAVVMIFGMIFSMILCCAIRRNREMV

SEQ ID NO: 31184 - protein, 62 aa, Homo sapiens
VAAVGGGGVEGRGAQARTNPHVPGRDPDPAAYREAKPAGWAAEPESGTVWSPLELRSGCSAS

SEQ ID NO: 31185 - protein, 89 aa, Homo sapiens
LEISKELLSPGVKNKNFKCHRTYRLFAVVYHHGNSATGGHYTRDVFQIGLNGWLRIDDQTVKVINQYQVVKPTAERTAHLLYYCRVDLL

SEQ ID NO: 31186 - protein, 41 aa, Homo sapiens
MFGAAARSADLVLLEKNLQAAHGCRYSTSMPWTLLWEDPII

SEQ ID NO: 31187 - protein, 27 aa, Homo sapiens
LARANAQDDHHPRVCHHLRLERSFMQG

SEQ ID NO: 31188 - protein, 21 aa, Homo sapiens
LEWKRPLFFLFCLSNSTQRSS

SEQ ID NO: 31189 - protein, 20 aa, Homo sapiens
ICQQQKKTNKNAGWMLKDKK

SEQ ID NO: 31190 - protein, 1990 aa, Homo sapiens
LRLRSAPASAMHGGGPPSGDSACPLRTIKRVQFGVLSPDELKRMSVTEGGIKYPETTEGGRPKLGGLMDPRQGVIERTGRCQTCAGNMTECPGHFGHIELAKPVFHVGFLVKTMKVLRCVCFFCSKLLVDSNNPKIKDILAKSKGQPKKRLTHVYDLCKGKNICEGGEEMDNKFGVEQPEGDEDLTKEKGHGGCGRYQPRIRRSGLELYAEWKHVNEDSQEKKILLSPERVHEIFKRISDEECFVLGMEPRYARPEWMIVTVLPVPPLSVRPAVVMQGSARNQDDLTHKLADIVKINNQLRRNEQNGAAAHVIAEDVKLLQFHVATMVDNELPGLPRAMQKSGRPLKSLKQRLKGKEGRVRGNLMGKRVDFSARTVITPDPNLSIDQVGVPRSIAANMTFAEIVTPFNIDRLQELVRRGNSQYPGAKYIIRDNGDRIDLRFHPKPSDLHLQTGYKVERHMCDGDIVIFNRQPTLHKMSMMGHRVRILPWSTFRLNLSVTTPYNADFDGDEMNLHLPQSLETRAEIQELAMVPRMIVTPQSNRPVMGIVQDTLTAVRKFTKRDVFLERGEVMNLLMFLSTWDGKVPQPAILKPRPLWTGKQIFSLIIPGHINCIRTHSTHPDDEDSGPYKHISPGDTKVVVENGELIMGILCKKSLGTSAGSLVHISYLEMGHDITRLFYSNIQTVINNWLLIEGHTIGIGDSIADSKTYQDIQNTIKKAKQDVIEVIEKAHNNELEPTPGNTLRQTFENQVNRILNDARDKTGSSAQKSLSEYNNFKSMVVSGAKGSKINISQVIAVVGQQNVEGKRIPFGFKHRTLPHFIKDDYGPESRGFVENSYLAGLTPTEFFFHAMGGREGLIDTAVKTAETGYIQRRLIKSMESVMVKYDATVRNSINQVVQLRYGEDGLAGESVEFQNLATLKPSNKAFEKKFRFDYTNERALRRTLQEDLVKDVLSNAHIQNELEREFERMREDREVLRVIFPTGDSKVVLPCNLLRMIWNAQKIFHINPRLPSDLHPIKVVEGVKELSKKLVIVNGDDPLSRQAQENATLLFNIHLRSTLCSRRMAEEFRLSGEAFDWLLGEIESKFNQAIAHPGEMVGALAAQSLGEPATQMTLNTFHYAGVSAKNVTLGVPRLKELINISKKPKTPSLTVFLLGQSARDAERAKDILCRLEHTTLRKVTANTAIYYDPNPQSTVVAEDQEWVNVYYEMPDFDVARISPWLLRVELDRKHMTDRKLTMEQIAEKINAGFGDDLNCIFNDDNAEKLVLRIRIMNSDENKMQEEEEVVDKMDDDVFLRCIESNMLTDMTLQGIEQISKVYMHLPQTDNKKKIIITEDGEFKALQEWILETDGVSLMRVLSEKDVDPVRTTSNDIVEIFTVLGIEAVRKALERELYHVISFDGSYVNYRHLALLCDTMTCRGHLMAITRHGVNRQDTGPLMKCSFEETVDVLMEAAAHGESDPMKGVSENIMLGQLAPAGTGCFDLLLDAEKCKYGMEIPTNIPGLGAAGPTGMFFGSAPSPMGGISPAMTPWNQGATPAYGAWSPSVGSGMTPGAAGFSPSAASDASGFSPGYSPAWSPTPGSPGSPGPSSPYIPSPGGAMSPSYSPTSPAYEPRSPGGYTPQSPSYSPTSPSYSPTSPSYSPTSPNYSPTSPSYSPTSPSYSPTSPSYSPTSPSYSPTSPSYSPTSPSYSPTSPSYSPTSPSYSPTSPSYSPTSPSYSPTSPSYSPTSPSYSPTSPSYSPTSPSYSPTSPSYSPTSPNYSPTSPNYTPTSPSYSPTSPSYSPTSPNYTPTSPNYSPTSPSYSPTSPSYSPTSPSYSPSSPRYTPQSPTYTPSSPSYSPSSPSYSPTSPTSTPQPVLLTVPAPQSIPQPLPSTHLPVPNIHPPLPSTRLPVPPIHPPPQNTPQHLLLIPQPLQSTPQPLPSTHLLAPLTRPLPPSTRPPAPPTRPPPPKAQPTLPLPLVTRPPAPPTVSQARLSARMTVTRRTEGTWGAAAG

SEQ ID NO: 31191 - protein, 21 aa, Homo sapiens
RSQSPTLSALMEVSSFGKSFI

SEQ ID NO: 31192 - protein, 25 aa, Homo sapiens
VLSTASSLRPLVMMRPFFVWHLQRR

SEQ ID NO: 31193 - protein, 54 aa, Homo sapiens
VLSTASSLRPLVMMVQSASVSKAGKGSSSSHGVAAALNQDLDPDPKCHVFNVSK

SEQ ID NO: 31194 - protein, 7 aa, Homo sapiens
IFMMKFL

SEQ ID NO: 31195 - protein, 580 aa, Homo sapiens
IMSDPAVNAQLDGIISDFEALKRSFEVEEVETPNSTPPRRVQTPLLRATVASSTQKFQDLGVKNSEPSARHVDSLSQRSPKASLRRVELSGPKAAEPVSRRTELSIDISSKQVENAGAIGPSRFGLKRAEVLGHKTPEPAPRRTEITIVKPQESAHRRMEPPASKVPEVPTAPATDAAPKRVEIQMPKPAEAPTAPSPAQTLENSEPAPVSQLQSRLEPKPQPPVAEATPRSQEATEAAPSCVGDMADTPRDAGLKQAPASRNEKAPVDFGYVGIDSILEQMRRKAMKQGFEFNIMVVGQSGLGKSTLINTLFKSKISRKSVQPTSEERIPKTIEIKSITHDIEEKGVRMKLTVIDTPGFGDHINNENCWQPIMKFINDQYEKYLQEEVNINRKKRIPDTRVHCCLYFIPATGHSLRPLDIEFMKRLSKVVNIVPVIAKADTLTLEERVHFKQRITADLLSNGIDVYPQKEFDEDSEDRLVNEKFREMIPFAVVGSDHEYQVNGKRILGRKTKWGTIEVENTTHCEFAYLRDLLIRTHMQNIKDITSSIHFEAYRVKRLNEGSSAMANGMEEKEPEAPEM

SEQ ID NO: 31196 - protein, 19 aa, Homo sapiens
VLLVVCMPCFHSVCTGKRT

SEQ ID NO: 31197 - protein, 249 aa, Homo sapiens
LAPVAFPLGRMAHAGRTGYDNREIVMKYIHYKLSQRGYEWDAGDVGAAPPGAAPAPGIFSSQPGHTPHPAASRDPVARTSPLQTPAAPGAAAGPALSPVPPVVHLTLRQAGDDFSRRYRRDFAEMSSQLHLTPFTARGRFATVVEELFRDGVNWGRIVAFFEFGGVMCVESVNREMSPLVDNIALWMTEYLNRHLHTWIQDNGGWDAFVELYGPSMRPLFDFSWLSLKTLLSLALVGACITLGAYLGHK

SEQ ID NO: 31198 - protein, 16 aa, Homo sapiens
MGMVCHSLLLFFVRHT

SEQ ID NO: 31199 - protein, 193 aa, Homo sapiens
LPSASEEQVAQDTEEVFRSYVFYHHQQEQEAEGAAAPADPEMVTLPLQPSSTMGQVGRQLAIIGDDINRRYDSEFQTMLQHLQPTAENAYEYFTKIASSLFESGINWGRVVALLGFSYRLALHIYQRGLTGFLGQVTRFVVDFMLHHCIARWIAQRGGWVAALNLGNGPILNVLVVLGVVLLGQFVVRRFFKS

SEQ ID NO: 31200 - protein, 59 aa, Homo sapiens
LNKLQALQEKRINEEEEKKKEKIKLKKKKKVLSSSTEEDTSKQKKRRYQKKEKKKRVNQ

SEQ ID NO: 31201 - protein, 5 aa, Homo sapiens
MGVAS

SEQ ID NO: 31202 - protein, 9 aa, Homo sapiens
MAPNDEISF

SEQ ID NO: 31203 - protein, 29 aa, Homo sapiens
RVYLQRAASSWDRGDRREFPGSSGRSQPH

SEQ ID NO: 31204 - protein, 144 aa, Homo sapiens
KGPLLVSTESHPVKSGIHKWISDYADSVPDPEALRVEVDTFMEAYDQKIAEEEAKAKEEEGVPDEEGWVKVTRRGRRPVLPRTEAASLRVLERERRKRSQKELLNYAWQHRESKMEHLAQLRKKFEEDKQRIELLRAQRKFRPY

SEQ ID NO: 31205 - protein, 114 aa, Homo sapiens
MRAGKGKMRNRHCIQCTGPYIIYNEDNGIIKAFRNIPGITLLNVSKLNILKLAPGGHVGLFCIWTKSAFQKLDEFNGTWRKASSLKSNYNLPIHKMINTDLSRILKSPEIQRAL

SEQ ID NO: 31206 - protein, 104 aa, Homo sapiens
MPGNRRDAVRKATGCRSWKGKVGGSAASCLRAGHTRRGCPGQGGIWLILPVPCALGAAPPSAQRSPPACFLEAGLPSVPRLACPPPAPRGQGKGSRSGLPGEFP

SEQ ID NO: 31207 - protein, 558 aa, Homo sapiens
MALQLINCPDYKLRPYQHSYLRSTVILVLTLLMICLMIGMAHVLVVYRVLASALFSSSAVPFLEEQVTTAVVVTGALVHYVTIIIMTKINRCVALKLCDFEMPRTFSERESRFTIRFFTLQFFTHFSSLIYIAFILGRINGHPGKSTRLAGLWKLEECHASGCMMDLFVQMAIIMGLKQTLSNCVEYLVPWVTHKCRSLRASESGHLPRDPELRDWRRNYLLNPVNTFSLFDEFMEMMIQYGFTTIFVAAFPLAPLLALFSNLVEIRLDAIKMVWLQRRLVPRKAKDIGQTGRAQDGRELGGLRPVGFPLARPAHLEKIISRISGRRQPPALLRRPRMRVEPGWEGTRSGRGRALCRLLPQTVRISEGLDAPKGDPGSASGWGWNRAAGLCPKTGHAETDRQQGSDGSWGAGCGERERGVREAPSLGPRLQGLTLGWEPRRWSGWGAQLRSSGRWRMRIPRFLPVHVRVRGAGAQRPCSAMAGDFLVNTAALGLQGDTTHRDTAGPVLAGGGGEGRTSRGTLSQTACPLLWCRDLAAGAGDHRCAGGHCQWDGHCLHI

SEQ ID NO: 31208 - protein, 97 aa, Homo sapiens
MEVSSFGAGSPGSTHQGSLASRVLPIKGSHVEFGMWKGGRSHPFLPCSSRRAGSGGQLDSILPHQSPAWGPWGCKDLSSGVPSFLTSSILWKSAVVK

SEQ ID NO: 31209 - protein, 56 aa, Homo sapiens [sequence omitted]

SEQ ID NO: 31210 - protein, 129 aa, Homo sapiens
MAEAPSGVETDLIDVGFTDDVKKGGPGRGGGGGFTAPVGGPDGMVPMPMPMPMLSANTPFSYPLPKGPSDFNGLPMGTYQAFPNIYPSQIPATPPSYESVDDINADKNISSAQIVGPGPKPEASAKLPS

SEQ ID NO: 31211 - protein, 78 aa, Homo sapiens
METGGDAPASLSPVSHTGHHHLFGTARPWGSPVSKGLSLSLCLSVNKCEFVKSKRARCSVEVGQAGGAGASQDLSSQL

SEQ ID NO: 31212 - protein, 107 aa, Homo sapiens
MAGKQINEGAAIDLNNRPPARSPALKFLRDPHPSWFVDLKVEAALQPFPPERKEAAPKSVLAPWPSCSFEGGGNRCFNPLFRRIWNEHFFFGGWGLFVPLNVLKQIS

SEQ ID NO: 31213 - protein, 360 aa, Homo sapiens
MCKAGFAGDDAPQAVFPSIVGRPRHQGMMEGMHQKESYVGKEAQSKRGMLTLKYPMEHGIITNWDDMEKIWHHTFYNELRVAPEEHPILLTEAPLNPKANREKMTQIMFETFNTPAMYVAIQAVLSLYTSGRTTGIVMDSGDGFTHTVPIYEGNALPHATLRLDLAGRELTDYLMKILTERGYRFTTTAEQEIVRDIKEKLCYVALDSEQEMAMAASSSSVEKSYELPDGQVITIGNERFRCPEALFQPCFLGMESCGIHKTTFNSIVKSDVDIRKDLYTNTVLSGGTTMYPGIAHRMQKEITALAPSIMKIKIIAPPKRKYSVWVGGSILASLSTFQQMWISKQEYDESGPSIVHRKCF

SEQ ID NO: 31214 - protein, 249 aa, Homo sapiens [sequence omitted]

SEQ ID NO: 31215 - protein, 121 aa, Homo sapiens
MSQVFSKIRTRHQTEEAGAPESTQGRVGEEGGRGCSAGAGRPQPRGTRRRAKTCHPAREGREGPREGAPFQPGETRVLAASLSSRQRAPVLTPAPFPRSMLLTKWPGEECRSPRGQALPKH

SEQ ID NO: 31216 - protein, 29 aa, Homo sapiens
MCQARIALDRCNLRTAFILFSLILSHYVF

SEQ ID NO: 31217 - protein, 65 aa, Homo sapiens
MLPRAPFPSPSTPFRDLLFPRAQQKWATASLTLAGVTKKGRRRPEQYIRRIQQSILRHERASGQN

SEQ ID NO: 31218 - protein, 128 aa, Homo sapiens
MSEHRNEALGNYLEMRLKSSFLRGLGSWKSNPLRLGGWTILLTLTMGQGEPGGPQGDPWVPHELLLPSLCDSSHASSWGSGSITCAWRGGDSSSHPLVSGHILSNSPVAAVMCSSMGTHLSPFKGTLL

SEQ ID NO: 31219 - protein, 17 aa, Homo sapiens
MKSTSCAWSTYSFRSDF

SEQ ID NO: 31220 - protein, 5 aa, Homo sapiens
MQITL

SEQ ID NO: 31221 - protein, 144 aa, Homo sapiens
LVLCEAAFPKTLAFAYLEDLHSEFDEQHGKKVPTVSRPYSFIEFDTFIQKTKKLYIDSCARRNLGSINTELQDVQRIMVANIEEVLQRGEALSALDSKANNLSSLSKKYRQDAKYLNMHSTYAKLAAVAVFFIMLIVYVRFWWL

SEQ ID NO: 31222 - protein, 69 aa, Homo sapiens
LECFPEWLELEPGTRSSLIEVQFMCLWVWMAQSVSGLRKADLAPTLTLTDPGIYSRNWKPSATGAWRSS

SEQ ID NO: 31223 - protein, 59 aa, Homo sapiens
IYLMGMCSRQDRIQKDIDVVIQKSRAEDCLFADTVQDNLLFIFSVNFKDDWDFLPPLPP

SEQ ID NO: 31224 - protein, 320 aa, Homo sapiens
MASCDFSIRTYTYADTPDDFQLHNFSLPEEDTKLKIPLIHRALQLAQRPVSLLASPWTSPTRLKTRGAGNGKGPLKGQPRDIYHQTWARYIVKFLDAYAEHKLQFWAVTAENEPSAGLLSGYPFQCLGFTPEHQRDFIARDLGPTLANGTHHNVRLLMLDDQRLLLPHWAKVVLTDPEAAKGLCGFQVLGAECAARLLGSRDAVQPQHHHKPPVPCGRLDRLEPIIVDITKHTFYKQPMFYHLGHFSKFIPEGSQRVGLVASQKNDPDAVALMHPDGSAVVVVLNRSSKDVPLTIKDPAVGFLETISPGYSIHTYLWRRQ

SEQ ID NO: 31225 - skipped

SEQ ID NO: 31226 - protein, 44 aa, Homo sapiens
KHYCPTSQMKSLGALWMCRRVGLPFYRPFAELRGQSRRQSRKQP

SEQ ID NO: 31227 - protein, 7 aa, Homo sapiens
MSLVISE

SEQ ID NO: 31228 - protein, 66 aa, Homo sapiens
LSSVLEFSSAQTISATDRICENTSMSRLGIILRHHLASPASHFKVITGSGLPLKGILMLTTSPRRA

SEQ ID NO: 31229 - protein, 66 aa, Homo sapiens
VPEPVPVFRSSQHSSWEGGATSLSLTSKVDQQRLQSPASFPTLMNCILKRTLSDWLCRLPVLEQDG

SEQ ID NO: 31230 - protein, 44 aa, Homo sapiens
KHYCPTSQMKSLGALWMCRRVGLPFYRPFAELRGQSRRQSRMQP

SEQ ID NO: 31231 - protein, 4 aa, Homo sapiens
MDHR

SEQ ID NO: 31232 - protein, 7 aa, Homo sapiens
MSLVISE

SEQ ID NO: 31233 - protein, 809 aa, Homo sapiens
VTSGLLPFPEVTLQALGEDEITLESVLRGKFAAGKNGLACLACGPQLEVVNSITGERLSAYRFSGVNEQPPVVLAVKEFSWQKRTGLLIGLEETEGSVLCLYDLGISKVVKAVVLPGRVTAIEPIINHGGASASTQHLHPSLRWLFGVAAVVTDVGQILLIDLCLDDLSCNQNEVEASDLEVLTGIPAEVPHIRESVMREGRHLCFQLVSPTGTAVSTLSYISRTNQLAAGFSDGYLALWNMKSMKREYYIQLESGQVPVYAVTFQEPENDRRNCCYLWAVQSTQDSEGDVLSLHLLQLAFGNRKCLASGQILYEWLEYCEERYTLDLTGGMFPLRGQTSNTKLLGCQSIEKFRSHGDREEGVNEALSPDTSVSVFTWQVNIYGQGKPSVYLGLFDINRWYHAQMPDSLRSGEYLHNCSYFALWSLESVVSRTSPHGILDILVHERSLNRGVPPSYPPPEQFFNPSTYNFDATCLLNSGVVHLTCTGFQKETLTFLKKSGPSLNELIPGGYNRRLVAGLLSPSFVDVQPSSLSQEEQLEAILSTAIQTSSLGLLTGYIRRWITEEQPNSATNLRFVLEWTWNKVVLTKEEFDRLCVPLFDGSCHFMDPQTIQSIQQCYLLLSNLNIVLSCFASEAREITERGLIDLSNKFVVSHLICQYAQVVLWFSHSGLLPEGIDDSVQLSRLCYNYPVIQNYYTSRRQKFERLSRGKWNPDCLMIDGLVSQLGERIEKLWKRDEGGTGKYPPASLHAVLDMYLLDGVTEAAKHSITIYLLLDIMYSFPNKTDTPIESFPTVFAISWGQVKLIQGFG

SEQ ID NO: 31234 - protein, 27 aa, Homo sapiens
LCAIHAKRLTIMPKEIQLARRIQGKRA

SEQ ID NO: 31235 - protein, 13 aa, Homo sapiens
TKQSLLLEQFFHH

SEQ ID NO: 31236 - protein, 17 aa, Homo sapiens
VAVKAVAATMMEKRNLH

SEQ ID NO: 31237 - protein, 39 aa, Homo sapiens
LPLQISPPSASDWIKGNHFSKGSLALSFQAILQPPEPST

SEQ ID NO: 31238 - protein, 9 aa, Homo sapiens
MKGSPLHRL

SEQ ID NO: 31239 - protein, 66 aa, Homo sapiens
LKNQLQSVMSSLGSHQNKETGLKTLIPESILPHIQNEIHAQRCQEESRQTGLSRLYKKHDASICFW

SEQ ID NO: 31240 - protein, 25 aa, Homo sapiens
KRLDCQSAMFNDYNFVFTSFAKKQQ

SEQ ID NO: 31241 - protein, 56 aa, Homo sapiens
LRDGATAPLLPACVRKVSLRGAPAPASGGEGGTCRGRSSEALGPLCSPAIARAALT

SEQ ID NO: 31242 - protein, 24 aa, Homo sapiens
MVATSAQVEVEFGSRGTLFPVASC

SEQ ID NO: 31243 - protein, 16 aa, Homo sapiens
MWRKTTAVSNLVSRAW

SEQ ID NO: 31244 - protein, 20 aa, Homo sapiens
MLEVPGSCGPWQVMCESRVS

SEQ ID NO: 31245 - protein, 27 aa, Homo sapiens
RRDLNSSCPTNSISAFLLTSCENYSSG

SEQ ID NO: 31246 - protein, 272 aa, Homo sapiens
LTTTAFPFVSVMSWKKALRIPGDLRVATVTLMLAMLSSLLAEGRDSPEDFVFQFKGMCYFTNGTERVRLVTRYIYNREEYARFDSDVGVYRAVTPQGRPDAEYWNSQKEVLEGTRAELDTVCRHNYEVAFRGILQRRVEPTVTISPSRTEALNHHNLLVCSVTDFYPGQIKVRWFRNDQEETAGVVSTPLIRNGDWTFQILVMLEMTPQRGDVYTCHVEHPSLQSPITVEWRAQSESAQSKMLSGVGGFVLGLIFLGLGLIIRQRSQKGLLH

SEQ ID NO: 31247 - protein, 53 aa, Homo sapiens
RVAVCPLIEARLSWKFQSCNDFCKWSFSVCLEISEYCVLGLICDDLIPNLNFC

SEQ ID NO: 31248 - protein, 33 aa, Homo sapiens
ILSRKNFYSISKTSLDFLILHKTKEKRNGSLQF

SEQ ID NO: 31249 - protein, 689 aa, Homo sapiens
LDYKDTIAVARFIVFLASSSTSRDGKPCIFLKAFEDLKSTVYVYVKSLRDFSTESMSLVPATNYIYTPLNQLKGGTIVNVYGVVKFFKPPYLSKGTDYCSVVTIVDQTNVKLTCLLFSGNYEALPIIYKNGDIVRFHRLKIQVYKKETQGITSSGFASLTFEGTLGAPIIPRTSSKYFNFTTEDHKMVEALRVWASTHMSPSWTLLKLCDVQPMQYFDLTCQLLGKAEVDGASFLLKVWDGTRTPFPSWRVLIQDLVLEGDLSHIHRLQNLTIDILVYDNHVHVARSLKVGSFLRIYSLHTKLQSMNSENQTMLSLEFHLHGGTSYGRGIRVLPESNSDVDQLKKDLESANLTANQHSDVICQSEPDDSFPSSGSVSLYEVERCQQLSATILTDHQYLERTPLCAILKQKAPQQYRIRAKLRSYKPRRLFQSVKLHCPKCHLLQEVPHEGDLDIIFQDGATKTPDVKLQNTSLYDSKIWTTKNQKGRKVAVHFVKNNGILPLSNECLLLIEGGTLSEICKLSNKFNSVIPVRSGHEDLELLDLSAPFLIQGTIHHYGCKQCSSLRSIQNLNSLVDKTSWIPSSVAEALGIVPLQYVFVMTFTLDDGTGVLEAYLMDSDKFFQIPASEVLMDDDLQKSVDMIMDMFCPPGIKIDAYPWLECFIKSYNVTNGTDNQICYQIFDTTVAEDVI

SEQ ID NO: 31250 - protein, 52 aa, Homo sapiens
IRRHPPSLPPHPQVRGVSSGSGDPEEPSRVTICSATWQELEEGMIFSGVFLR

SEQ ID NO: 31251 - protein, 101 aa, Homo sapiens
IGGFASGPALPLIPQPAVRNPCRIHETLPIAAGGHFALELTTPEQGRDSPDAGRLFCPFGDTSPPLPGPASLKGSPCSCLDAGFFSGSGKPAASRDDAPQR

SEQ ID NO: 31252 - protein, 57 aa, Homo sapiens
LILLRNKNLINPSSLLELFFELLCCHDKLLQKTSYTYIVTDIKNINAKHKNKVDVVL

SEQ ID NO: 31253 - protein, 59 aa, Homo sapiens
ILLDPSPFPGTVIVTGGGCGCHCTAPTATAAPDLGDHVLPLQKELPFVTRRGRRSTLGP

SEQ ID NO: 31254 - protein, 6 aa, Homo sapiens
MSQALC

SEQ ID NO: 31255 - protein, 453 aa, Homo sapiens
IVVIGHVDSGKSTTTGHLIYKCGGIDKRTIEKFEKEAAEMGKGSFKYAWVLDKLKAERERGITIDISLWKFETSKYYVTIIDAPGHRDFIKNMITGTSQADCAVLIVAAGVGEFEAGISKNGQTREHALLAYTLGVKQLIVGVNKMDSTEPPYSQKRYEEIVKEVSTYIKKIGYNPDTVAFVPISGWNGDNMLEPSANMPWFKGWKVTRKDGNASGTTLLEALDCILPPTRPTDKPLRLPLQDVYKIGGIGTVPVGRVETGVLKPGMVVTFAPVNVTTEVKSVEMHHEALSEALPGDNVGFKVKNVSVKDVRRGNVAGDSKNDPPMEAAGFTAQVIILNHPGQISAGYAPVLDCHMAHIACKFAELKEKIDRRSGKKLEDGPKFLKSGDAAIVDMVPGKPMCVESFSDYPPLGRFAVRDMRQTVAVGVIKAVDKKAAGAGKVTKSAQKAQKAK

SEQ ID NO: 31256 - protein, 102 aa, Homo sapiens
KLLGFLDVENTPCARHSILYGSLGSVVAGFGHFLFTSRIRRSCDVGVGGFILVTLGCWFHCRYNYARQRIQERIAREEIKKKILYEGTHLDPERKHNGGSSN

SEQ ID NO: 31257 - protein, 26 aa, Homo sapiens
LPWPLSCSSSASRILFCCSRKRTLSM

SEQ ID NO: 31258 - protein, 9 aa, Homo sapiens
ILLSVKFLT

SEQ ID NO: 31259 - protein, 17 aa, Homo sapiens
KANDSRCNRKQENPISG

SEQ ID NO: 31260 - protein, 381 aa, Homo sapiens [sequence omitted]

SEQ ID NO: 31261 - protein, 465 aa, Homo sapiens
KQLMCDECDMAFHIYCLDPPLSSVPSEDEWYCPECRNDASEVVLAGERLRESKKKAKMASATSSSQRDWDKGMACVGRTKECTIIPSNHYGPIPGIPVGTMWRFRVQVSESGVHRPHVAGIHGRSNDGAYSLVLAGGYEDDVDHGNFFTYTGSGGRELSGNKRTAEQSCDQKLTNTNRALALNCFAPINDQEGAEAKDWRSGKPVRVVRNVKGGKNSKYAPAEGNRYDGIYKVVKYWPEKGKSGFLVWRYLLRRDDDEPGPWTKEGKDRIKKLGLTMQYPEGYLEALANREREKENSKREEEEQQEGGFASPRTGKGKWKRKSAGGGPSRAGSPRRTSKKTKVEPYSLTAQQSSLIREDKSNAKLWNEVLASLKDRPASGSPFQLFLSKVEETFQCICCQELVFRPITTVCQHNVCKDCLDRSFRAQVFSCPACRYDLGRSYAMQVNQPLQTVLNQLFPGYGNGR

SEQ ID NO: 31262 - protein, 13 aa, Homo sapiens
LWLLAVTRTTGGD

SEQ ID NO: 31263 - protein, 30 aa, Homo sapiens
IEYLHNALEHDMRLRFNNDRMKTTIKETST

SEQ ID NO: 31264 - protein, 54 aa, Homo sapiens
KMSFERCTARNKMFVNSPFTKVDNYCTFLMEKVLFKVLFLIEYYQKGKKNDLNF

SEQ ID NO: 31265 - protein, 57 aa, Homo sapiens
KGNAEAPGVTVGEGDPEPRRPPGEATDPLSRSRRALGGPSPPPPPEEEGGEMEARGG

SEQ ID NO: 31266 - protein, 29 aa, Homo sapiens
IVQSSRKKRSQSPTLSALMEVSSFGKSFI

SEQ ID NO: 31267 - protein, 51 aa, Homo sapiens
TASSLRPLVMMVQSASVSKAGKGSSSSHGVAAALNQDLDPDPKCHVFNVSK

SEQ ID NO: 31268 - protein, 10 aa, Homo sapiens
TEFHSVARLE

SEQ ID NO: 31269 - protein, 245 aa, Homo sapiens
LRYAASVRDATAATRLAAFLGATPPGDPTRRASSAAPIPLGLLGAALSSVTLYTRKLAGTMGKKQNKKKVEEVLEEEEEEYVVEKVLDRRVVKGKVEYLLKWKGFSDEDNTWEPEENLDCPDLIAEFLQSQKTAHETDKSEGGKRKADSDSEDKGEESKPKKKKEESEKPRGFARGLEPERIIGATDSSGELMFLMKWKNSDEADLVPAKEANVKCPQVVISFYEERLTWHSYPSEDDDKKDDKN

SEQ ID NO: 31270 - protein, 27 aa, Homo sapiens
IPASVPGSFIVPSPLSLSWGGVKRSRG

SEQ ID NO: 31271 - protein, 58 aa, Homo sapiens
IEIHACARACVRACKLPRRGKHHRTSANTGLKIVIHLPPPLPFFFLELLRSPVGIPAD

SEQ ID NO: 31272 - protein, 27 aa, Homo sapiens
MPRGKHQNQVFRVIEDTPSSKNAKHIQ

SEQ ID NO: 31273 - protein, 158 aa, Homo sapiens
TSPAPLRTPPRLDGWAHASHWGPGSRRWAPTLGPRGAANHTGLRPSYPAPSPSTSTFTSPPFHFFLYVFFLLETDSIHIEYNIFVYLTGRGRGGDRGGAGPAAWYSSPRGHWEGDPRPLPSPLCTVLWKRNTHLVSKEFILRRVCVCVCLFFLLNLFK

SEQ ID NO: 31274 - protein, 62 aa, Homo sapiens
LANPKLGLEPGSQILDPELHLCQEPRGERMAVSVAMSKLCILQTLCFPKIGTQKRTDHFLQL

SEQ ID NO: 31275 - protein, 164 aa, Homo sapiens
IHYVEAVFSMGPVTPAHAGAYRCCGCFSHSRYEWSAPSDPLDIVITGKYKKPSLSTQVDPMMRLGEKLTLFCSSEISFDQYHLFRHGVAHGQWLSGGQRHREAFQANFSVGRATPVPGGTYRCYGSFNDSPYKPPVTRCNFTPQETLRVLLCHSQNPPLNLVSK

SEQ ID NO: 31276 - protein, 190 aa, Homo sapiens
ILSQTENKVPVPQGYPGGVPTFFRDMKQGLLSVGIGGRESRNGCLDVEKDCSITKFLNRILGLEVHKQNALFQYFSDTFDHLIEMDKREGKYDMGILDLAPGIEEIYEESQQVFLAPGHPQDGQVVFYKISVDRGLKWEDAFAKSLALTGPYDGFYLSYKVGSGGVTPPEEGPRGADRGAASTPPSAGPR

SEQ ID NO: 31277 - protein, 58 aa, Homo sapiens
LVPFPPAPSADLSRRPLPSHRPTQDPGLVTGQCDASRLPRGQRGTHRAWAAPEATRPG

SEQ ID NO: 31278 - protein, 50 aa, Homo sapiens
VSRPLCRSEPPRIRVSSGKTLAGLVGCAAPRTASHQPAPSLSCSTLICTP

SEQ ID NO: 31279 - protein, 45 aa, Homo sapiens
VSHDCRPMCVRGVLWESMDPEVPGLSADLCPVCPVAPGDVSSRRG

SEQ ID NO: 31280 - protein, 165 aa, Homo sapiens
VVAVYGTLSDLLSVASSKLGIKATSVYNGKGGLIDDIALIRDDDVLFVCEGESFIDPQTDSKPPEGLLGFHTDWLTLNVGGRYFTTTRSTLVNKEPDSMLAHMFKDKSVWGNKQYHRGAFLIDRSPEYFEPILNSLRHGQLIVNDGINLLGVLEEARFFGIVSLI

SEQ ID NO: 31281 - skipped

SEQ ID NO: 31282 - protein, 18 aa, Homo sapiens
LLGVGTSVWEVEVALMHI

SEQ ID NO: 31283 - protein, 8 aa, Homo sapiens
MSPQNSGW

SEQ ID NO: 31284 - protein, 51 aa, Homo sapiens
MWGLGTTSSFRWYSSDYRRSFQLNSPVDKMRKTGEQAFSVFTYKVRSVMGQ

SEQ ID NO: 31285 - protein, 86 aa, Homo sapiens
IRTYTYADTPDDFQLHNFSLPEEDTKLKIPLIHRALQLAQRPVSLLASPWTSPTRLKTRGAGNGKGPLKGQPRDIYHQTWARYIVK

SEQ ID NO: 31286 - skipped

SEQ ID NO: 31287 - protein, 31 aa, Homo sapiens
LTSKVDQQRLQSPASFPTLMNCILKRTLSDW

SEQ ID NO: 31288 - protein, 25 aa, Homo sapiens
IFPCSAPLNTTKYLGNYSADNDKGL

SEQ ID NO: 31289 - protein, 60 aa, Homo sapiens
LCDSSHASSWGSGSITCAWRGGDSSSHPLVSGHILSNSPVAAVMCSSMGTHLSPFKGTLL

SEQ ID NO: 31290 - protein, 708 aa, Homo sapiens
RSCCDSPLPFSRVTPVVPRLPRANLCGCRHRRVEFPASGRTELFSRIQCSVSSPQSQSGADREQGTGMAKAAAIGIDLGTTYSCVGVFQHGKVEIIANDQGNRTTPSYVAFTDTERLIGDAAKNQVALNPQNTVFDAKRLIGRKFGDPVVQSDMKHWPFQVINDGDKPKVQVSYKGETKAFYPEEISSMVLTKMKEIAEAYLGYPVTNAVITVPAYFNDSQRQATKDAGVIAGLNVLRIINEPTAAAIAYGLDRTGKGERNVLIFDLGGGTFDVSILTIDDGIFEVKATAGDTHLGGEDFDNRLVNHFVEEFKRKHKKDISQNKRAVRRLRTACERAKRTLSSSTQASLEIDSLFEGIDFYTSITRARFEELCSDLFRSTLEPVEKALRDAKLDKAQIHDLVLVGGSTRIPKVQKLLQDFFNGRDLNKSINPDEAVAYGAAVQAAILMGDKSENVQDLLLLDVAPLSLGLETAGGVMTALIKRNSTIPTKQTQIFTTYSDNQPGVLIQVYEGERAMTKDNNLLGRFELSGIPPAPRGVPQIEVTFDIDANGILNVTATDKSTGKANKITITNDKGRLSKEEIERMVQEAEKYKAEDEVQRERVSAKNALESYAFNMKSAVEDEGLKGKISEADKKKVLDKCQEVISWLDANTLAEKDEFEHKRKELEQVCNPIISGLYQGAGGPGPGGFGAQGPKGGSGSGPTIEEVD

SEQ ID NO: 31291 - protein, 168 aa, Homo sapiens [sequence omitted]

SEQ ID NO: 31292 - protein, 28 aa, Homo sapiens
RLSRSTSTRALSLVSWSTCRRSSRISSS

SEQ ID NO: 31293 - protein, 430 aa, Homo sapiens
LQYILNKYLKGKVVTKEKIQEAKDVYKEHFQDDVVNEKGWNYILEKYDGHLPIEIKAVPEGFVIPRGNVLFTVENTDPECYWLTNWIETILVQSWYPITVATNSREQKKILAKYLLETSGNLDGLEYKLHDFGYRGVSSQETAGIGASAHLVNFKGTDTVAGLALNKKYYGTKDPVPGYSVPAAEHSTITAWGKDHEKDAFEHIVTQFSSVPVSVVSNSYDIYNACEKIWGEDLRHLIVSRSTQAPLIIRPDSGNPLDTVLKVLEILGKKFPVTENSKGYKLLPPYLRVIQGDGVDINTLQEIVEGMKQKMWSIENIAFGSGGGLLQKLTRDLLNCSFKCSYVVTNGLGINVFKDPVADPNKRSKKGRLSLHRTPAGNFVTLEEGKGDLEEYGQDLLHTVFKNGKVTKSYSFDEIRKNAQLNIELEAAHH

SEQ ID NO: 31294 - protein, 252 aa, Homo sapiens
VDTGIGMTKADLINNLGTIAKSGTKAFMEALQAGADISMIGQFGVSFYSAYLVAEKVTVITKHNDDEQYAWESSAGGSFTVRTDTGERMGRGTKVILHLKEDQTEYLEEQRIKEIVKKHSQLIGYPITLFVEKECDKEVSDDETEEKEDKEEEKEKEEKESKDKPEIEDVGSDEEEEKKDGDKKKKKTKEKYIDQEELNKTKPIWTRNPDDITNEEYGEFCKNLTNDWEDHLAVKHFSVEGQLEFRALLFVP

SEQ ID NO: 31295 - protein, 126 aa, Homo sapiens
KKFYEQFSKNIKLGIQEDSQNRKKLSELLRYYTSASGDEMVSLKDYCTRMKEKQKHIYYITGETKDQVANSAFVERLGKHGLEVIYMIEPIDEYCVQQLKEFEGKTLVPVTKEGLELPEDEEKKKK

SEQ ID NO: 31296 - skipped

SEQ ID NO: 31297 - protein, 22 aa, Homo sapiens
KCGPVAPHCRFSSFLPPFRKLN

SEQ ID NO: 31298 - protein, 272 aa, Homo sapiens
KRAVSREDSVKPVAHLTVKKIFVGGIKEDTEEYNLRDYFEKCSKIETIEVMEDRQSGKKRGFAFVTFDDHDIIDKIVVQKYHTINGHNCEVKKALSKQEMQSAGSQRGHGGGSGNFMGRGGNFGGAGGNFGLGGNFGGRGGYGGGGGGSRGSYGRGDGGYNRFGRDGGNYGGGPGYSSRGGYGGGGTGYGNQGGGYGGGGGGYDGYNEGGNFGGGNYGGGGNYNDFGNHSGQQQSNYGPMKGGSFGGRSSGSPYGGGYGSGGGSGGYGSRRF

SEQ ID NO: 31299 - protein, 51 aa, Homo sapiens
KLSGLLRKQKKAKQASKKTAMAAAKAPTKAAPKQKTVKVVKVSAPQVGGKR

SEQ ID NO: 31300 - protein, 117 aa, Homo sapiens
IGNSYFKEEKYKDAIHFYNKSLAEHRTPDVLKKCQQAEKILKEQERLAYINPDLALEEKNKGNECFQKGDYPHAMKHYTEAIKRNPKDAKLYSNRAACYTKLLDSSWHSRTVKNVSS

SEQ ID NO: 31301 - protein, 258 aa, Homo sapiens
MEIIANDQGNRIMPSYVAFTPEGECLIGDAAKNQLTSNPKNTVFDAKRLIGRRWHDPSVQQDIEFLPFKVVEKNTKSYIQIDVGGGQTKTFAPKEISAMVLTKMKENAEAYLGKVTHAVVTAPAYFNDAQCQATKDAGTIADLNVMRIINKPTAAAIAYGLDKREGEKNILVFDLGGGTFDVSLLTIDNGVFKVVATNGDTYLGGEDFDQRVMEHFIKLYKKKTGKDVRKDNRAVQKLWRKVEKAKRALSSQHQASSN

SEQ ID NO: 31302 - protein, 51 aa, Homo sapiens
MTGRYRAHHRNAPSMLVCCVLSFISSQLKLALLTWCTQSKNCKKTGAKPLP

SEQ ID NO: 31303 - protein, 28 aa, Homo sapiens
MGSLPYAFVLVLQKGNLTEDHAVLKKYK

SEQ ID NO: 31304 - protein, 243 aa, Homo sapiens
MEAMGTEATRRQQATVTFSQTATAIMILGLPRASKSQFYSNGGHSGNASGGGGGGGGGSSGYGSYYQGDNYNSPVPPKHAGKKQPHGGQQKPSYGSGYQSHQGQQQSYNQSPYSNYGPPQGKQKGYNHGQGSYSYSNSYNSPGGGGGSDYNYESKFNYSGSGGRSGGNSYGSGGASYNPGSHGGYGGGSGGGSSYQGKQGGYSQSNYNSPGSGQNYSGPPSSYQSSQGGYGRNADHSMNYQYR

SEQ ID NO: 31305 - protein, 312 aa, Homo sapiens
MLTLKYPMEHGIITNWDDMEKIWHHTFYNELRVAPEEHPILLTEAPLNPKANREKMTQIMFETFNTPAMYVAIQAVLSLYTSGRTTGIVMDSGDGFTHTVPIYEGNALPHATLRLDLAGRELTDYLMKILTERGYRFTTTAEQEIVRDIKEKLCYVALDSEQEMAMAASSSSVEKSYELPDGQVITIGNERFRCPEALFQPCFLGMESCGIHKTTFNSIVKSDVDIRKDLYTNTVLSGGTTMYPGIAHRMQKEITALAPSIMKIKIIAPPKRKYSVWVGGSILASLSTFQQMWISKQEYDESGPSIVHRKCF

SEQ ID NO: 31306 - protein, 269 aa, Homo sapiens
MDGMLLNGLNVFVGRFRSPKEQEAELGARAKESKVGPASSVKVITDEGGKSKGFGFVSFERHEDPQTAMDVNGKEFSGNQTYICLAPKKVEEQTELKCKFEQMKQDRITRYQGANVCVKNLDESIDDERLQKEFSPFGIINSANVMMEGGCSKRFGFVCFSSPEEVAKAVTAMNGKIVASKPLHVALAQCKEQRLAHFTNQYMQKMASVRAVPHPVINPYQPAPSTCYFVAAIPQTQNRAAYYPPGQIAQLRPSPPWAVQSVRPYPFQI

SEQ ID NO: 31307 - protein, 10 aa, Homo sapiens
MLVATGQCSR

SEQ ID NO: 31308 - protein, 696 aa, Homo sapiens
VTPVVPRLPRANLCGCRHRRVEFPASGRTELFSRIQCSVSSPQSQSGADREQGTGMAKAAAIGIDLGTTYSCVGVFQHGKVEIIANDQGNRTTPSYVAFTDTERLIGDAAKNQVALNPQNTVFDAKRLIGRKFGDPVVQSDMKHWPFQVINDGDKPKVQVSYKGETKAFYPEEISSMVLTKMKEIAEAYLGYPVTNAVITVPAYFNDSQRQATKDAGVIAGLNVLRIINEPTAAAIAYGLDRTGKGERNVLIFDLGGGTFDVSILTIDDGIFEVKATAGDTHLGGEDFDNRLVNHFVEEFKRKHKKDISQNKRAVRRLRTACERAKRTLSSSTQASLEIDSLFEGIDFYTSITRARFEELCSDLFRSTLEPVEKALRDAKLDKAQIHDLVLVGGSTRIPKVQKLLQDFFNGRDLNKSINPDEAVAYGAAVQAAILMGDKSENVQDLLLLDVAPLSLGLETAGGVMTALIKRNSTIPTKQTQIFTTYSDNQPGVLIQVYEGERAMTKDNNLLGRFELSGIPPAPRGVPQIEVTFDIDANGILNVTATDKSTGKANKITITNDKGRLSKEEIERMVQEAEKYKAEDEVQRERVSAKNALESYAFNMKSAVEDEGLKGKISEADKKKVLDKCQEVISWLDANTLAEKDEFEHKRKELEQVCNPIISGLYQGAGGPGPGGFGAQGPKGGSGSGPTIEEVD

SEQ ID NO: 31309 - protein, 133 aa, Homo sapiens
TPPAATATATAPGIAFGTAPAPAPAAAPLGTVPAPTSWRLGCSCPKSTRLPTCAPRPATTCTPPSWRPARRRSPWSRSTRWARYWAAAASARSTQASASPTTCRWPSNTWRRTGFPTGESCLMALECPWKWSC

SEQ ID NO: 31310 - protein, 41 aa, Homo sapiens
LAPWPPRDPDISSSSICPLSSGRQAFDARGPWQLWSLASDV

SEQ ID NO: 31311 - protein, 21 aa, Homo sapiens
LMLEVPGSCGPWQVMCESRVS

SEQ ID NO: 31312 - skipped

SEQ ID NO: 31313 - protein, 4 aa, Homo sapiens
VEQL

SEQ ID NO: 31314 - protein, 24 aa, Homo sapiens
LRAWEGLAGCQMSCPNSAGLQLPA

SEQ ID NO: 31315 - protein, 13 aa, Homo sapiens
LRSLLESHVQAVL

SEQ ID NO: 31316 - protein, 22 aa, Homo sapiens
LRSLLESHVQAVFVHETGRRPC

SEQ ID NO: 31317 - protein, 4 aa, Homo sapiens
LVRR

SEQ ID NO: 31318 - protein, 90 aa, Homo sapiens
LIPQPAVRNPCRIHETLPIAAGGHFALELTTPEQGRDSPDAGRLFCPFGDTSPPLPGPASLKGSPCSCLDAGFFSGSGKPAASRDDAPQR

SEQ ID NO: 31319 - protein, 77 aa, Homo sapiens
LGRPGRASRGMGARAAEEAPLVCPLVERALPALRGFQPGSFGKPGRLLTGDDTCVGCWHSCYLTREGGDFACDGLPV

SEQ ID NO: 31320 - protein, 23 aa, Homo sapiens
LMTVCLYLTVSCFSNSMGLLSNR

SEQ ID NO: 31321 - protein, 55 aa, Homo sapiens
ILSRSLAVKENRECAKEHTDTEQTGHLCNHMEVCLILKLKKLSWKTERPSPDDIV

SEQ ID NO: 31322 - protein, 16 aa, Homo sapiens
RFNNDRMKTTIKETST

SEQ ID NO: 31323 - protein, 28 aa, Homo sapiens
LDPDPKCHVFNVSSQRCQMGSAQPCLCC

SEQ ID NO: 31324 - protein, 12 aa, Homo sapiens
LVSGANTSSLAE

SEQ ID NO: 31325 - protein, 281 aa, Homo sapiens [sequence omitted]

SEQ ID NO: 31326 - protein, 39 aa, Homo sapiens
MASASEKSTESCRSRTPGTLLRRRTAEERVAYTPPGDEA

SEQ ID NO: 31327 - protein, 28 aa, Homo sapiens
MSYLHWGISITLRFLLLMRTLSAYAKKF

SEQ ID NO: 31328 - protein, 73 aa, Homo sapiens
MGTRRHAAGWAERGGRLQGPRARVKRGLGAGLAGLALPAPLRPRRPGNAHLGLRRLRWEDWSPSRASPPAPEH

SEQ ID NO: 31329 - protein, 41 aa, Homo sapiens
MAQPTAGRAGGAGARCGAGIQRTRSPPLAFVVLRFSARTLC

SEQ ID NO: 31330 - protein, 347 aa, Homo sapiens
MESESESGAAADTPPLETLSFHGDEEIIEVVELDPGPPDPDDLAQEMEDVDFEEEEEEEGNEEGWVLEPQEGVVGSMEGPDDSEVTFALHSASVFCVSLDPKTNTLAVTGGEDDKAFVWRLSDGELLFECAGHKDSVTCAGFSHDSTLVATGDMSGLLKVWQVDTKEEVWSFEAGDLEWMEWHPRAPVLLAGTADGNTWMWKVPNGDCKTFQGPNCPATCGRVLPDGKRAVVGYEDGTIRIWDLKQGSPIHVLKGTEGHQGPLTCVAANQDGSLILTGSVDCQAKLVSATTGKVSGPGARLGPPLSRLLSFLPGSSLSPLPTVFLSIKHPDSVSSSDPLWLSGGGCF

SEQ ID NO: 31331 - protein, 62 aa, Homo sapiens [sequence omitted]

SEQ ID NO: 31332 - protein, 47 aa, Homo sapiens
MSEDKDFCPDATLTSCPSVFYFLKKERWINRGNPRIKALLSVTHFSH

SEQ ID NO: 31333 - protein, 114 aa, Homo sapiens
RLLCKKKDGTKKGRVNGAQTYGLKACALPICCLAPSETRAKICPGLECFPEWLELEPGTRSSLIEVQFMCLWVWMAQSVSGLRKADLAPTLTLTDPGIYSRNWKPSATGAWRSS

SEQ ID NO: 31334 - protein, 10 aa, Homo sapiens
MRMKAETSGA

SEQ ID NO: 31335 - protein, 79 aa, Homo sapiens
ISCSPWKPLDSSVMSPVIQQPWPSFDGLNIWSSLNSLYIGNLPASIHIPTSVCIPRYKMVQSVYLLSHSTKIFQGPGFL

SEQ ID NO: 31336 - protein, 10 aa, Homo sapiens
MRMKAETSGA

SEQ ID NO: 31337 - protein, 43 aa, Homo sapiens
IQQPRPSFDGLNIWSSLNSLYIGNLPASIHIPTSVCIPRITGR

SEQ ID NO: 31338 - protein, 13 aa, Homo sapiens
LCVPGSLDPQPGA

SEQ ID NO: 31339 - protein, 12 aa, Homo sapiens
LSNSNMNNPFHR

SEQ ID NO: 31340 - protein, 164 aa, Homo sapiens
LARPPAASPGSALSCPPTRPRPSAPAAATAATPPAATATATAPGIAFGTAPAPAPAAAPLGTVPAPTSWRLGCSCPKSTRLPTCAPRPATTCTPPSWRPARRRSPWSRSTRWARYWAAAASARSTQASASPTTCRWPSNTWRRTGFPTGESCLMALECPWKWSC

SEQ ID NO: 31341 - protein, 32 aa, Homo sapiens
IQCEFSKQEFMDGMTELGCDSIEKLKAQIPKM

SEQ ID NO: 31342 - protein, 24 aa, Homo sapiens
LNSSCPTNSISAFLLTSCENYSSG

SEQ ID NO: 31343 - protein, 12 aa, Homo sapiens
LFEPRDPDMPEN

SEQ ID NO: 31344 - protein, 22 aa, Homo sapiens
LGGPSPPPPPEEEGGEMEARGG

SEQ ID NO: 31345 - protein, 38 aa, Homo sapiens
ISGTCKAFLKDMKKYAETFLEPWFKAPNKGTFQIVYKS

SEQ ID NO: 31346 - protein, 20 aa, Homo sapiens
ISSSSHLLGWSLPWIGTLPG

SEQ ID NO: 31347 - protein, 5 aa, Homo sapiens
MEGNK

SEQ ID NO: 31348 - protein, 454 aa, Homo sapiens
LPQGVPQQCLAAWAGTLSLKQRSHFFWAHEAAVPCSAEHGGAMPLQLLLLLILLGPGNSLQLWDTWADEAEKALGPLLARDRRQATEYEYLDYDFLPETEPPEMLRNSTDTTPLTGPGTPESTTVEPAARRSTGLDAGGAVTELTTELANMGNLSTDSAAMEIQTTQPAATEAQTTQPVPTEAQTTPLAATEAQTTRLTATEAQTTPLAATEAQTTPPAATEAQTTQPTGLEAQTTAPAAMEAQTTAPAAMEAQTTPPAAMEAQTTQTTAMEAQTTAPEATEAQTTQPTATEAQTTPLAAMEALSTEPSATEALSMEPTTKRGLFIPFSVSSVTHKGIPMAASNLSVNYPVGAPDHISVKQCLLAILILALVATIFFVCTVVLAVRLSRKGHMYPVRNYSPTEMVCISSLLPDGGEGPSATANGGLSKAKSPGLTPEPREDREGDDLTLHSFLP

SEQ ID NO: 31349 - protein, 168 aa, Homo sapiens
IEVTFEIDVNGILRVTAEDKGTGNKNKITITNDQNHLTPEEIKRMVNDAEKFAEEDTKLKECIDTTNELESYGYSLKNQIGDKEKLGGKLSSEDKETMEKAVEEKIEWLESHQAADIEDFEANKKELEEIVQPLISKLYGSASPLPATKRIRQKKMSCRHRSATAVIL

SEQ ID NO: 31350 - protein, 450 aa, Homo sapiens
IGHVDSGKSTTTGHLIYKCGGIDKRTIEKFEKEAAEMGKGSFKYAWVLDKLKAERERGITIDISLWKFETSKYYVTIIDAPGHRDFIKNMITGTSQADCAVLIVAAGVGEFEAGISKNGQTREHALLAYTLGVKQLIVGVNKMDSTEPPYSQKRYEEIVKEVSTYIKKIGYNPDTVAFVPISGWNGDNMLEPSANMPWFKGWKVTRKDGNASGTTLLEALDCILPPTRPTDKPLRLPLQDVYKIGGIGTVPVGRVETGVLKPGMVVTFAPVNVTTEVKSVEMHHEALSEALPGDNVGFKVKNVSVKDVRRGNVAGDSKNDPPMEAAGFTAQVIILNHPGQISAGYAPVLDCHMAHIACKFAELKEKIDRRSGKKLEDGPKFLKSGDAAIVDMVPGKPMCVESFSDYPPLGRFAVRDMRQTVAVGVIKAVDKKAAGAGKVTKSAQKAQKAK

SEQ ID NO: 31351 - protein, 449 aa, Homo sapiens
KTENSKLRKVKYEETVFYGLQYILNKYLKGKVVTKEKIQEAKDVYKEHFQDDVVNEKGWNYILEKYDGHLPIEIKAVPEGFVIPRGNVLFTVENTDPECYWLTNWIETILVQSWYPITVATNSREQKKILAKYLLETSGNLDGLEYKLHDFGYRGVSSQETAGIGASAHLVNFKGTDTVAGLALNKKYYGTKDPVPGYSVPAAEHSTITAWGKDHEKDAFEHIVTQFSSVPVSVVSNSYDIYNACEKIWGEDLRHLIVSRSTQAPLIIRPDSGNPLDTVLKVLEILGKKFPVTENSKGYKLLPPYLRVIQGDGVDINTLQEIVEGMKQKMWSIENIAFGSGGGLLQKLTRDLLNCSFKCSYVVTNGLGINVFKDPVADPNKRSKKGRLSLHRTPAGNFVTLEEGKGDLEEYGQDLLHTVFKNGKVTKSYSFDEIRKNAQLNIELEAAHH

SEQ ID NO: 31352 - protein, 1753 aa, Homo sapiens
ISDEECFVLGMEPRYARPEWMIVTVLPVPPLSVRPAVVMQGSARNQDDLTHKLADIVKINNQLRRNEQNGAAAHVIAEDVKLLQFHVATMVDNELPGLPRAMQKSGRPLKSLKQRLKGKEGRVRGNLMGKRVDFSARTVITPDPNLSIDQVGVPRSIAANMTFAEIVTPFNIDRLQELVRRGNSQYPGAKYIIRDNGDRIDLRFHPKPSDLHLQTGYKVERHMCDGDIVIFNRQPTLHKMSMMGHRVRILPWSTFRLNLSVTTPYNADFDGDEMNLHLPQSLETRAEIQELAMVPRMIVTPQSNRPVMGIVQDTLTAVRKFTKRDVFLERGEVMNLLMFLSTWDGKVPQPAILKPRPLWTGKQIFSLIIPGHINCIRTHSTHPDDEDSGPYKHISPGDTKVVVENGELIMGILCKKSLGTSAGSLVHISYLEMGHDITRLFYSNIQTVINNWLLIEGHTIGIGDSIADSKTYQDIQNTIKKAKQDVIEVIEKAHNNELEPTPGNTLRQTFENQVNRILNDARDKTGSSAQKSLSEYNNFKSMVVSGAKGSKINISQVIAVVGQQNVEGKRIPFGFKHRTLPHFIKDDYGPESRGFVENSYLAGLTPTEFFFHAMGGREGLIDTAVKTAETGYIQRRLIKSMESVMVKYDATVRNSINQVVQLRYGEDGLAGESVEFQNLATLKPSNKAFEKKFRFDYTNERALRRTLQEDLVKDVLSNAHIQNELEREFERMREDREVLRVIFPTGDSKVVLPCNLLRMIWNAQKIFHINPRLPSDLHPIKVVEGVKELSKKLVIVNGDDPLSRQAQENATLLFNIHLRSTLCSRRMAEEFRLSGEAFDWLLGEIESKFNQAIAHPGEMVGALAAQSLGEPATQMTLNTFHYAGVSAKNVTLGVPRLKELINISKKPKTPSLTVFLLGQSARDAERAKDILCRLEHTTLRKVTANTAIYYDPNPQSTVVAEDQEWVNVYYEMPDFDVARISPWLLRVELDRKHMTDRKLTMEQIAEKINAGFGDDLNCIFNDDNAEKLVLRIRIMNSDENKMQEEEEVVDKMDDDVFLRCIESNMLTDMTLQGIEQISKVYMHLPQTDNKKKIIITEDGEFKALQEWILETDGVSLMRVLSEKDVDPVRTTSNDIVEIFTVLGIEAVRKALERELYHVISFDGSYVNYRHLALLCDTMTCRGHLMAITRHGVNRQDTGPLMKCSFEETVDVLMEAAAHGESDPMKGVSENIMLGQLAPAGTGCFDLLLDAEKCKYGMEIPTNIPGLGAAGPTGMFFGSAPSPMGGISPAMTPWNQGATPAYGAWSPSVGSGMTPGAAGFSPSAASDASGFSPGYSPAWSPTPGSPGSPGPSSPYIPSPGGAMSPSYSPTSPAYEPRSPGGYTPQSPSYSPTSPSYSPTSPSYSPTSPNYSPTSPSYSPTSPSYSPTSPSYSPTSPSYSPTSPSYSPTSPSYSPTSPSYSPTSPSYSPTSPSYSPTSPSYSPTSPSYSPTSPSYSPTSPSYSPTSPSYSPTSPSYSPTSPNYSPTSPNYTPTSPSYSPTSPSYSPTSPNYTPTSPNYSPTSPSYSPTSPSYSPTSPSYSPSSPRYTPQSPTYTPSSPSYSPSSPSYSPTSPTSTPQPVLLTVPAPQSIPQPLPSTHLPVPNIHPPLPSTRLPVPPIHPPPQNTPQHLLLIPQPLQSTPQPLPSTHLLAPLTRPLPPSTRPPAPPTRPPPPKAQPTLPLPLVTRPPAPPTVSQARLSARMTVTRRTEGTWGAAAG

SEQ ID NO: 31353 - protein, 74 aa, Homo sapiens
MLASLSGFLMTTTSKHAAYCLKGSCLTQARVQWPLKLTTASNFWAQVILSLPVVFVDCLMESHGTRRLKQCLQF

SEQ ID NO: 31354 - protein, 78 aa, Homo sapiens
MPGLANMKMILCFLLPHHRLQEARQIQVLKMLPREKLRRREERKQINGKKERTKYETPRKREGKKGGNNHICHLSKRD

SEQ ID NO: 31355 - protein, 53 aa, Homo sapiens
MSFERCTARNKMFVNSPFTKVDNYCTFLMEKVLFKVLFLIEYYQKGKKNDLNF

SEQ ID NO: 31356 - protein, 1947 aa, Homo sapiens
MSVTEGGIKYPETTEGGRPKLGGLMDPRQGVIERTGRCQTCAGNMTECPGHFGHIELAKPVFHVGFLVKTMKVLRCVCFFCSKLLVDSNNPKIKDILAKSKGQPKKRLTHVYDLCKGKNICEGGEEMDNKFGVEQPEGDEDLTKEKGHGGCGRYQPRIRRSGLELYAEWKHVNEDSQEKKILLSPERVHEIFKRISDEECFVLGMEPRYARPEWMIVTVLPVPPLSVRPAVVMQGSARNQDDLTHKLADIVKINNQLRRNEQNGAAAHVIAEDVKLLQFHVATMVDNELPGLPRAMQKSGRPLKSLKQRLKGKEGRVRGNLMGKRVDFSARTVITPDPNLSIDQVGVPRSIAANMTFAEIVTPFNIDRLQELVRRGNSQYPGAKYIIRDNGDRIDLRFHPKPSDLHLQTGYKVERHMCDGDIVIFNRQPTLHKMSMMGHRVRILPWSTFRLNLSVTTPYNADFDGDEMNLHLPQSLETRAEIQELAMVPRMIVTPQSNRPVMGIVQDTLTAVRKFTKRDVFLERGEVMNLLMFLSTWDGKVPQPAILKPRPLWTGKQIFSLIIPGHINCIRTHSTHPDDEDSGPYKHISPGDTKVVVENGELIMGILCKKSLGTSAGSLVHISYLEMGHDITRLFYSNIQTVINNWLLIEGHTIGIGDSIADSKTYQDIQNTIKKAKQDVIEVIEKAHNNELEPTPGNTLRQTFENQVNRILNDARDKTGSSAQKSLSEYNNFKSMVVSGAKGSKINISQVIAVVGQQNVEGKRIPFGFKHRTLPHFIKDDYGPESRGFVENSYLAGLTPTEFFFHAMGGREGLIDTAVKTAETGYIQRRLIKSMESVMVKYDATVRNSINQVVQLRYGEDGLAGESVEFQNLATLKPSNKAFEKKFRFDYTNERALRRTLQEDLVKDVLSNAHIQNELEREFERMREDREVLRVIFPTGDSKVVLPCNLLRMIWNAQKIFHINPRLPSDLHPIKVVEGVKELSKKLVIVNGDDPLSRQAQENATLLFNIHLRSTLCSRRMAEEFRLSGEAFDWLLGEIESKFNQAIAHPGEMVGALAAQSLGEPATQMTLNTFHYAGVSAKNVTLGVPRLKELINISKKPKTPSLTVFLLGQSARDAERAKDILCRLEHTTLRKVTANTAIYYDPNPQSTVVAEDQEWVNVYYEMPDFDVARISPWLLRVELDRKHMTDRKLTMEQIAEKINAGFGDDLNCIFNDDNAEKLVLRIRIMNSDENKMQEEEEVVDKMDDDVFLRCIESNMLTDMTLQGIEQISKVYMHLPQTDNKKKIIITEDGEFKALQEWILETDGVSLMRVLSEKDVDPVRTTSNDIVEIFTVLGIEAVRKALERELYHVISFDGSYVNYRHLALLCDTMTCRGHLMAITRHGVNRQDTGPLMKCSFEETVDVLMEAAAHGESDPMKGVSENIMLGQLAPAGTGCFDLLLDAEKCKYGMEIPTNIPGLGAAGPTGMFFGSAPSPMGGISPAMTPWNQGATPAYGAWSPSVGSGMTPGAAGFSPSAASDASGFSPGYSPAWSPTPGSPGSPGPSSPYIPSPGGAMSPSYSPTSPAYEPRSPGGYTPQSPSYSPTSPSYSPTSPSYSPTSPNYSPTSPSYSPTSPSYSPTSPSYSPTSPSYSPTSPSYSPTSPSYSPTSPSYSPTSPSYSPTSPSYSPTSPSYSPTSPSYSPTSPSYSPTSPSYSPTSPSYSPTSPSYSPTSPNYSPTSPNYTPTSPSYSPTSPSYSPTSPNYTPTSPNYSPTSPSYSPTSPSYSPTSPSYSPSSPRYTPQSPTYTPSSPSYSPSSPSYSPTSPTSTPQPVLLTVPAPQSIPQPLPSTHLPVPNIHPPLPSTRLPVPPIHPPPQNTPQHLLLIPQPLQSTPQPLPSTHLLAPLTRPLPPSTRPPAPPTRPPPPKAQPTLPLPLVTRPPAPPTVSQARLSARMTVTRRTEGTWGAAAG

SEQ ID NO: 31357 - protein, 173 aa, Homo sapiens
MRMGPCGIRPQLFKGHNFQPSKQSSNYERGFLLSLKRFAGLRSQHGYLESVGSGKSSKRNGYPDIGHTQQRERERERRERGERGESPCTQCFRVLLYSTPWSTAIAVLGRAQDSLWFCLLASCCFLIFGKKPCLTYAWPSWKLLVFIFRVWNGLTWPIYFPVSTKEGLPGTTN

SEQ ID NO: 31358 - protein, 120 aa, Homo sapiens
LFPVSARLLCKKKDGTKKGRVNGAQTYGLKACALPICCLAPSETRAKICPGLECFPEWLELEPGTRSSLIEVQFMCLWVWMAQSVSGLRKADLAPTLTLTDPGIYSRNWKPSATGAWRSS

SEQ ID NO: 31359 - protein, 70 aa, Homo sapiens
LLLPLKNQLQSVMSSLGSHQNKETGLKTLIPESILPHIQNEIHAQRCQEESRQTGLSRLYKKHDASICFW

SEQ ID NO: 31360 - protein, 51 aa, Homo sapiens
TAPLLPACVRKVSLRGAPAPASGGEGGTCRGRSSEALGPLCSPAIARAALT

SEQ ID NO: 31361 - protein, 130 aa, Homo sapiens
LRMSEHRNEALGNYLEMRLKSSFLRGLGSWKSNPLRLGGWTILLTLTMGQGEPGGPQGDPWVPHELLLPSLCDSSHASSWGSGSITCAWRGGDSSSHPLVSGHILSNSPVAAVMCSSMGTHLSPFKGTLL

SEQ ID NO: 31362 - protein, 5 aa, Homo sapiens
LSVDE

SEQ ID NO: 31363 - protein, 17 aa, Homo sapiens
IEARLSWKFQSCNDFFS

SEQ ID NO: 31364 - protein, 48 aa, Homo sapiens
VRVFLNSVLMASASEKSTESCRSRTPGTLLRRRTAEERVAYTPPGDEA

SEQ ID NO: 31365 - protein, 5 aa, Homo sapiens
IYMGT

SEQ ID NO: 31366 - protein, 326 aa, Homo sapiens
IKDKAIGNTFFDAGAAEFLTSKLIAEKSEAKIAYKRTRYTTEGRKKEARSKSKSDNVGSALGPDWHEGLNLKGTKEFSHKIHLEAMCEVKKIYLQDEFRILKKKSFTFPRDHTSVTTNTEMWPVYVELTNEKIYGCDFIVSATGVTPNIEPFLHGNSFDLGEDGGLKVDDHMHTSLPDIYAAGDICTTSWQLSPVWQQMRLWTQARQMGWYAAKCMAAASSGDSIDMDFSFELFAHVTKFFNYKVVLLGKYNAQGLGSDHELMLRCTKGQEYIKVVMQNGRMMGAFLIGETDLEETFENLILNQMNLSSYGEDLLDPNIDIEDYFD

SEQ ID NO: 31367 - protein, 22 aa, Homo sapiens
RRFPALTNSSSPRPSAQETPSK

SEQ ID NO: 31368 - protein, 14 aa, Homo sapiens
LEILLIFTPSPRDS

SEQ ID NO: 31369 - protein, 255 aa, Homo sapiens
LGREVPLAPVAFPLGRMAHAGRTGYDNREIVMKYIHYKLSQRGYEWDAGDVGAAPPGAAPAPGIFSSQPGHTPHPAASRDPVARTSPLQTPAAPGAAAGPALSPVPPVVHLTLRQAGDDFSRRYRRDFAEMSSQLHLTPFTARGRFATVVEELFRDGVNWGRIVAFFEFGGVMCVESVNREMSPLVDNIALWMTEYLNRHLHTWIQDNGGWDAFVELYGPSMRPLFDFSWLSLKTLLSLALVGACITLGAYLGHK

SEQ ID NO: 31370 - protein, 138 aa, Homo sapiens
VGRQLAIIGDDINRRYDSEFQTMLQHLQPTAENAYEYFTKIASSLFESGINWGRVVALLGFSYRLALHIYQRGLTGFLGQVTRFVVDFMLHHCIARWIAQRGGWVAALNLGNGPILNVLVVLGVVLLGQFVVRRFFKS

SEQ ID NO: 31371 - protein, 931 aa, Homo sapiens
MYNAVMLGWARQGAFKELVYVLFMVKDAGLTPDLLSYAAALQCMGRQDQDAGTIERCLEQMSQEGLKLQALFTAVPLSEEDRATVLKAVHKVKPTFSLPLQLPPPVNTSKLLRDVYAKDGRVSYPKLHLPLKTLQCLFEKQLHVELASRMCVVSVEKPTLPSKEVTHARKTLKTLRDQWEKALCRELRETKNRLERQVYEGRFSLYPFLCLLDECEVVRMLLQVLQALPAQGESFTTLARELSARTFSRHVVQRQRVSAQVQALQNHYRKYLCLLASDAEVPEPCLPRQYCEALGAPEALREQPWPLPVQMELGKLLAEMLVQATQMPCSLDKPHRSSRLVPVVYHVYSFRNVQQIGILKPHPAYVQLLEKATEPTLTFEAVDVPMFCPPLPWTSPHSGAFLLSPTKLMRTVEGATQHQELLETCPPTALHGALDALAQLGNCAWRVNGRVLDLVLQLFQAKGCPYLGVPAPPSEAPQPPEAHLPHSAAPARKAELHRELAHCQKVAREMHSLRAEALYRLSLAQHLRDRVFWRPHNMDFRSRTYPCPPHFNHLGSDVARALLEFAQGRPLGPRGLDWLKIHLVNLTGLKKREPLRKRLAFAEEVMDDILDSADQPLTGRKWWMGAEEPWQTLACCMEVANTVRASDPAAYVSHLPVHQDGSCNGLQHYAALGRDSVGAASVNLEPSDVPQDVYSGVAGQVEVFRRQDAQRGTRVAQVLEGFITREVVKQTVMTMVYGVTRYGGRLQIEKRLRELNDFPQEFVWEASHYLVRQVFKSLQEMFSGTRAIQHWLTESARLISHTGSVVEWVTPLGVPVIQPYRLDSKVKQIGGGIQSITYTHNGDISRKPNTRKQKNGFPPNFIHSLDSSHMMLTALHCYRKGLTFVSVHDCYWTHAADVSCHEPGVPGAVCPLAQRAHPAGPVQVPGQAVLL

SEQ ID NO: 31372 - protein, 39 aa, Homo sapiens
MLRSECRLFIGCLGWGKGGWAEEVCRERGSVLLRLVQMV

SEQ ID NO: 31373 - protein, 105 aa, Homo sapiens
MTSGDCVSDQDGLDKLSVHSPPETLIPLVCFLWVNIVVSWTCHKQCQVHQSHLGFLCPAGVSHDCRPMCVRGVLWESMDPEVPGLSADLCPVCPVAPGDVSSRRG

SEQ ID NO: 31374 - protein, 47 aa, Homo sapiens [sequence omitted]

SEQ ID NO: 31375 - protein, 233 aa, Homo sapiens
MTHIVREVDRPGSKVNKKEVVEAVTIVERPPVGIVGCVETPQGFRTCKTVFAEHISDECKRHFYKNWHKSKKKAFTKYCKKWQDEDGKKQLEKDFSSMKKYCQVICVIAHTQMQLLPLCQKKAHLMEIQVNGGTVAEKLDWAGERLKHQVPVNQVFGQDEMIDVIRVTKGKGYKRVTSRWHTKKLPRKTHQGLCKVACIGAWHPARVGFSVVRGGQKGYHHRTEINKKIYRIG

SEQ ID NO: 31376 - protein, 91 aa, Homo sapiens
MQDWQELRCSHLPRRPPFHIQQRRRGQPLRRFFTRLRPGHAQVHVHFSGYQVATYLKWCESYSFGTVVDFQIGKSKGPKRQLTGDHALGFS

SEQ ID NO: 31377 - protein, 115 aa, Homo sapiens
MNYIDLFNLRKKRFWTREGRFSFLRALSFGGFFVWAPLPFFTFSSYWETTLPWPVPPCSSQSHPDASLASSPSVPVSGIGGFLVSLTSTMKPRTLAKRQRMLTQTYRLGLQGSAR

SEQ ID NO: 31378 - protein, 209 aa, Homo sapiens
MDYVHTKNLIYQDVKPENFLVGRPGTKRQHAIHIIDLGLAKGYTGLRTKKHIPCSQHKSLTGTACYMSINMHLGKEQSHCNNLEVLGHMFMYFLCSSLPWQGLKADTIMSGTEDRGHIARHAHRSALRELPRGDGYVPALRAAPGLRSSTTTTCGSSPATSSTEAASCSTLSTRGSGSPWRPPSAVSTPTCPPSLSFGTKISRTAKTRR

SEQ ID NO: 31379 - protein, 35 aa, Homo sapiens
MNYGCHECPCEAVGKPWLDCEGYLKSILESTRSSM

SEQ ID NO: 31380 - protein, 85 aa, Homo sapiens
ICCLAPSETRAKICPGLECFPEWLELEPGTRSSLIEVQFMCLWVWMAQSVSGLRKADLAPTLTLTDPGIYSRNWKPSATGAWRSS

SEQ ID NO: 31381 - protein, 4 aa, Homo sapiens
MMIT

SEQ ID NO: 31382 - protein, 18 aa, Homo sapiens
LDGRCFLSFKLTFQTSGA

SEQ ID NO: 31383 - protein, 57 aa, Homo sapiens
VATGQCSRCFMFTFSTFSFNCHNSEVDSVRDRLPQDHSAPANSMQLTLTLNTLQLHS

SEQ ID NO: 31384 - protein, 21 aa, Homo sapiens
VAAVMCSSMGTHLSPFKGTLL

SEQ ID NO: 31385 - protein, 42 aa, Homo sapiens
LSWKFQSCNDFCKWSFSVCLEISEYCVLGLICDDLIPNLNFC

SEQ ID NO: 31386 - protein, 485 aa, Homo sapiens
RCHPPPSALSTPPSPGEGGEFRKRRPRGTQQGHHLQRNMAGAGGGNDIQWCFSQVKGAVDDDVAEADIISTVEFNHSGELLATGDKGGRVVIFQQEQENKIQSHSRGEYNVYSTFQSHEPEFDYLKSLEIEEKINKIRWLPQKNAAQFLLSTNDKTIKLWKISERDKRPEGYNLKEEDGRYRDPTTVTTLRVPVFRPMDLMVEASPRRIFANAHTYHINSISINSDYETYLSADDLRINLWHLEITDRSFNIVDIKPANMEELTEVITAAEFHPNSCNTFVYSSSKGTIRLCDMRASALCDRHSKLFEEPEDPSNRSFFSEIISSISDVKFSHSGRYMMTRDYLSVKIWDLNMENRPVETYQVHEYLRSKLCSLYENDCIFDKFECCWNGSDSVVMTGSYNNFFRMFDRNTKRDITLEASRENNKPRTVLKPRKVCASGKRKKDEISVDSLDFNKKILHTAWHPKENIIAVATTNNLYIFQDKVN

SEQ ID NO: 31387 - protein, 20 aa, Homo sapiens
LLRRRTAEERVAYTPPGDEA

SEQ ID NO: 31388 - protein, 4 aa, Homo sapiens
MSCG

SEQ ID NO: 31389 - protein, 47 aa, Homo sapiens
RGTTVGQAAWKISAGSPRQNSHAPGQAVPTAWWRGNLTSGRAPLLHS

SEQ ID NO: 31390 - protein, 5 aa, Homo sapiens
IKTYF

SEQ ID NO: 31391 - protein, 23 aa, Homo sapiens
LEHDMRLRFNNDRMKTTIKETST

SEQ ID NO: 31392 - protein, 18 aa, Homo sapiens
VLFLIEYYQKGKKNDLNF

SEQ ID NO: 31393 - protein, 9 aa, Homo sapiens
IWLRHLSPH

SEQ ID NO: 31394 - protein, 129 aa, Homo sapiens
MKRRIHLELRNWTPSAVRELVLDNCKSNDGKIEGLTAEFVNLEFLSLINVGLISVSNLPKLPKLKKLELSENRIFGGLDMLAEKLPNLTRLNLSGNKLKDISTLEPLKKLECLKSLDLFNCEVTNMNDY

SEQ ID NO: 31395 - protein, 127 aa, Homo sapiens
INRRYDSEFQTMLQHLQPTAENAYEYFTKIASSLFESGINWGRVVALLGFSYRLALHIYQRGLTGFLGQVTRFVVDFMLHHCIARWIAQRGGWVAALNLGNGPILNVLVVLGVVLLGQFVVRRFFKS

SEQ ID NO: 31396 - protein, 37 aa, Homo sapiens
LIFPTLSVRSPPPLDARAPGESTAGRMVGSTLTIGGN

SEQ ID NO: 31397 - protein, 30 aa, Homo sapiens
LAGLVGCAAPRTASHQPAPSLSCSTLICTP

SEQ ID NO: 31398 - protein, 159 aa, Homo sapiens
VVFQKPSGVSAALALKGPLLVSTESHPVKSGIHKWISDYADSVPDPEALRVEVDTFMEAYDQKIAEEEAKAKEEEGVPDEEGWVKVTRRGRRPVLPRTEAASLRVLERERRKRSQKELLNYAWQHRESKMEHLAQLRKKFEEDKQRIELLRAQRKFRPY

SEQ ID NO: 31399 - protein, 31 aa, Homo sapiens
MSHLHLMTVSHWPATCSRYSCAGCGTPHLCS

SEQ ID NO: 31400 - protein, 44 aa, Homo sapiens
MFPSSSSSSSGSQTDSSIEDAAKGKIKKKRREKTNKWEKRKDKI

SEQ ID NO: 31401 - protein, 72 aa, Homo sapiens
MAQSGGAAFWGSALGLQTQGAEMLAAGPPTRARQPALPGELRGAEVPGEAAPGARALPDLGNRQSGAPGSKS

SEQ ID NO: 31402 - protein, 38 aa, Homo sapiens
MFHVGSSFRALLFTSKKVPLRTGCQFVLLCWLLMKIIK

SEQ ID NO: 31403 - protein, 114 aa, Homo sapiens
MEIDKHSLNIGDYNRTVGKGPGSRPQISKESSMERNPYFDKNGNPSMFGVGNTAAQPRGMQQPPAQPLSSSQPNLRAQVPPPLLSPQVNKLSLHSPVYLQKGSCMILYLNKMAN

SEQ ID NO: 31404 - protein, 30 aa, Homo sapiens
MRSLGFIFKGMKQLRLFWKTFWQLVKLEYN

SEQ ID NO: 31405 - protein, 230 aa, Homo sapiens
MHAAAHPGLRPLRLCHDTADRAGEAAPALKVAAAFRAGWRDLPHSPTLGLRGPGKPLQEGTRSSSGFWSGVPAAAEASGGNTTKKGRQLGPSKGVATRAQQPRSVTAQSSAPAFPSLCQGLMAKPALGAFFPVPIWLLCCTKLGSQPAKSRLGLASPLAGLEVGRVGCGASSLCVGPGRWLKSPLQERIKVSRVVRKPESGSPDSSLWGAFFMFSQLFQDWAVEFHVSGA

SEQ ID NO: 31406 - protein, 288 aa, Homo sapiens [sequence omitted]

SEQ ID NO: 31407 - protein, 62 aa, Homo sapiens [sequence omitted]

SEQ ID NO: 31408 - protein, 62 aa, Homo sapiens [sequence omitted]

SEQ ID NO: 31409 - protein, 229 aa, Homo sapiens
MVTEPKAVSTPALATTQQSAPASTTAVTSSTTTTVAQAPTPVPALAPPFTPAFITPVSVTVSSEPATASATKQEKPAEKPAETPVATSLTSTHSTSGDSSWSNLFEDATSALVMGQSYDNMVTEIMSMGYEREQVIAAPRASSNNPDRAVEYLLMGIPGDKVRLWLTPTKQLVLGLLSLQQWLQLQQLRQQQLQQVLEHPLEFLWNQPQFQQMRQIIQQSPSLLPVLLQ

SEQ ID NO: 31410 - protein, 52 aa, Homo sapiens
MSQPGARGQWDRRVPRRLFVAKVRIRLPLTGRKHPCRGSPNKTAVFLVWFQT

SEQ ID NO: 31411 - protein, 957 aa, Homo sapiens
MHPVLSGELQPQSISVQGSSLLISASNSLVADHLQRCGCEYSLSVFFLESGLAKEKVFTMQDLLQLIKINPTSSLYKSLVSGADKENQKGFLMHFLKGLAEYHQAKESCNMETQTSSTFSRDSLAEKLQLIDDQFADAYPQRIKFESLEIKLNEYKREIEEQLREEICQKLKFFKDTEIGKIKMEAKKKYEKELAVFQNDFEKACQAKSEALVIREKSTLERIQKHQEIETKEIYAQRQLLLKDMDLLRGREAELKQRVEAFELNQKLQEEKHKSMTEALRRREQNIKSFEKTYDQKLKNELLKYQLELKDDYIIRTNRLIEDERKNKEKAVHLQEELIAFNSKKEELNQSINRMKELELELESVKAQSLAITKQNHMLNEKVKVMSDYSLLKEERLELLAQNKLLKQQLEESRNENLRLLNRLAQLAPELAVFQKELRRAEKATVVEHEEFESRKQALHKQLQDEIEHTTQLKAQILGYKVSIKRLTIQVADLKSQLKQTQTALENEVYCNPKQSVIHHSANGLINGNMVLHNGEISGDFLNNPFKQEKVLAGTVASRITNYPNAGMEGSSPDSDLEFVANTNARVKQLQQEAERLEKAFRSYHRRDIKNSAKGPLPAKSPPSLHLLEAFKNITSSSPERRIFAEDRVVSEQPQVGTLKEERNDILEALTGSAASRLCGGTSSRRLSSTPLPKAKRSLESEIYLEGLGRSHIASPSPYPDRMPPPSPAESRHNLSIPPFSSPPEQKAGLYWRQNELQDKSEFSDADKLAFKDNEEFESSFEYARNVPRQFEMDGPSPAGDMLHMGAAVAAVPLSYQHPSVDQKQIEEQKEEEKIWEQQVKERKQREERRQSNLQEILERERRELEKLYQERRMTEESLKIEMENELEMSNQEMKDKSAHSENPLEKYMKIIQQDQESADKSSKKMVQEGSLVDTLQCSDKVESLTRFSHEEPDDSW

SEQ ID NO: 31412 - protein, 36 aa, Homo sapiens
MGSLDPVLKLSCSKAALCAIRINEGEGFCVEKRLGV

SEQ ID NO: 31413 - protein, 30 aa, Homo sapiens
MLGSLAPDPGSRRHSGQAALRPRRFNHQGL

SEQ ID NO: 31414 - protein, 185 aa, Homo sapiens
MGIQERNDKLFYRILQDDTESLMPIAYTPTVGLVCSQCGHLFRRPKGLFISISDRGHVRSIVDKWPENHVKAVLVTDGERILGHGDLGVYGMGIPVGKICLYTVCPGIWPDRCLLVCIDVGADNIALLKGTFYMGLYQKRDRTQQSDDPIDEFMKAITDRYGWNTLLQFEGFGHHNAFRFLRKYQ

SEQ ID NO: 31415 - protein, 5 aa, Homo sapiens
MLMYL

SEQ ID NO: 31416 - protein, 44 aa, Homo sapiens
LEMESRPPPPPPPPPPPPPSPPLTQDHFRNQLAFSPCLGQRFHF

SEQ ID NO: 31417 - protein, 40 aa, Homo sapiens
VKTRMKTSMMSHLHLMTVSHWPATCSRYSCAGCGTPHLCS

SEQ ID NO: 31418 - skipped

SEQ ID NO: 31419 - protein, 288 aa, Homo sapiens
LLQAQKWPFQPSRDMRLVQFWAPHLVGPHLGLETGNGRGIINLNAFDPTLPKTMTQFLEQGEATLSVARRALAAQLPVLPRSEVTFLAPVTWPDKVVCVGMNYVDHCKEQNVPVPKEPIIFSKFASSIVGPYDEVVLPPQSQEVDWEVELAVVIGKKGKHIKATDAMAHVAGFTVAHDVSARDWLTRCNGKQWLLGKTFDTFCPLGPALVTKDSVADPHNLKICCRVNGEVVQSSNTNQMVFKTEDLIAWVSQFVTFYPGDVILTGTPPPPPRCRCIQETSCLSQEGG

SEQ ID NO: 31420 - protein, 89 aa, Homo sapiens
MPKVTEDPATISCSPWKPLDSSVMSPVIQQPWPSFDGLNIWSSLNSLYIGNLPASIHIPTSVCIPRYKMVQSVYLLSHSTKIFQGPGFL

SEQ ID NO: 31421 - protein, 13 aa, Homo sapiens
LCVPGSLDPQPGA

SEQ ID NO: 31422 - protein, 67 aa, Homo sapiens
ILSSVLEFSSAQTISATDRICENTSMSRLGIILRHHLASPASHFKVITGSGLPLKGILMLTTSPRRA

SEQ ID NO: 31423 - protein, 1108 aa, Homo sapiens
ISFRGCGGEEEGKKRAGRPLLPPSLLSLSFSPFLTRPPTPPAAGDAARESAGPGSVSSAAAAAAAALRLGIPKRRTPFLSFSRSARLSAFVPRGRPARRLRPSPCVRPSRPASLGLRLSTRAFLRTRGPARPLRPQRLPFPSPPLLPPPSPTLPTPFSCPEARCACACVCPSANAATSARQMNSVRAANRRPRRVSRPRPVQQQQQQPPQQPPPQPPQQQPPQQQPPPPPQQQQQQQPPPPPPPPPPLPQERNNVGERDDDVPADMVAEESGPGAQNSPYQLRRKTLLPKRTACPTKNSMEGASTSTTENFGHRAKRARVSGKSQDLSAAPAEQYLQEKLPDEVVLKIFSYLLEQDLCRAACVCKRFSELANDPILWKRLYMEVFEYTRPMMHPEPGKFYQINPEEYEHPNPWKESFQQLYKGAHVKPGFAEHFYSNPARYKGRENMLYYDTIEDALGGVQEAHFDGLIFVHSGIYTDEWIYIESPITMIGAAPGKVADKVIIENTRDSTFVFMEGSEDAYVGYMTIRFNPDDKSAQHHNAHHCLEITVNCSPIIDHCIIRSTCTVGSAVCVSGQGACPTIKHCNISDCENVGLYITDHAQGIYEDNEISNNALAGIWVKNHGNPIIRRNHIHHGRDVGVFTFDHGMGYFESCNIHRNRIAGFEVKAYANPTVVRCEIHHGQTGGIYVHEKGRGQFIENKIYANNFAGVWITSNSDPTIRGNSIFNGNQGGVYIFGDGRGLIEGNDIYGNALAGIQIRTNSCPIVRHNKIHDGQHGGIYVHEKGQGVIEENEVYSNTLAGVWVTTGSTPVLRRNRIHSGKQVGVYFYDNGHGVLEDNDIYNHMYSGVQIRTGSNPKIRRNKIWGGQNGGILVYNSGLGCIEDNEIFDNAMAGVWIKTDSNPTLRRNKIHDGRDGGICIFNGGRGLLEENDIFRNAQAGVLISTNSHPILRKNRIFDGFAAGIEITNHATATLEGNQIFNNRFGGLFLASGVNVTMKDNKIMNNQDAIEKAVSRGQCLYKISSYTSYPMHDFYRCHTCNTTDRNAICVNCIKKCHQGHDVEFIRHDRFFCDCGAGTLSNPCTLAGEPTHDTDTLYDSAPPIESNTLQHN

SEQ ID NO: 31424 - protein, 804 aa, Homo sapiens
LPFPEVTLQALGEDEITLESVLRGKFAAGKNGLACLACGPQLEVVNSITGERLSAYRFSGVNEQPPVVLAVKEFSWQKRTGLLIGLEETEGSVLCLYDLGISKVVKAVVLPGRVTAIEPIINHGGASASTQHLHPSLRWLFGVAAVVTDVGQILLIDLCLDDLSCNQNEVEASDLEVLTGIPAEVPHIRESVMREGRHLCFQLVSPTGTAVSTLSYISRTNQLAAGFSDGYLALWNMKSMKREYYIQLESGQVPVYAVTFQEPENDRRNCCYLWAVQSTQDSEGDVLSLHLLQLAFGNRKCLASGQILYEWLEYCEERYTLDLTGGMFPLRGQTSNTKLLGCQSIEKFRSHGDREEGVNEALSPDTSVSVFTWQVNIYGQGKPSVYLGLFDINRWYHAQMPDSLRSGEYLHNCSYFALWSLESVVSRTSPHGILDILVHERSLNRGVPPSYPPPEQFFNPSTYNFDATCLLNSGVVHLTCTGFQKETLTFLKKSGPSLNELIPGGYNRRLVAGLLSPSFVDVQPSSLSQEEQLEAILSTAIQTSSLGLLTGYIRRWITEEQPNSATNLRFVLEWTWNKVVLTKEEFDRLCVPLFDGSCHFMDPQTIQSIQQCYLLLSNLNIVLSCFASEAREITERGLIDLSNKFVVSHLICQYAQVVLWFSHSGLLPEGIDDSVQLSRLCYNYPVIQNYYTSRRQKFERLSRGKWNPDCLMIDGLVSQLGERIEKLWKRDEGGTGKYPPASLHAVLDMYLLDGVTEAAKHSITIYLLLDIMYSFPNKTDTPIESFPTVFAISWGQVKLIQGFG

SEQ ID NO: 31425 - protein, 20 aa, Homo sapiens
VKRPYRITDFMLALPPYKIT

SEQ ID NO: 31426 - protein, 32 aa, Homo sapiens
KDCMCSLLCCILSSLTTVPSTQRALPVYLLSK

SEQ ID NO: 31427 - protein, 191 aa, Homo sapiens
RTPTQTLSGMTSYAKRVSYPPRKELEELEEEAEEEQRILQQSVVKTYEDMTLEELEDHEGEFNEEDECAIEMYRQQRLAEWKATKLKNKSGKVLEISGKDYVQEVTKAGEGLWVILHLYKQGIPLCALINQHLSGLARKFPDVKFIKAISTTCIPNYTDRNLPTIFVYLEGDIKAQFIGPLSVWRHEPDKR

SEQ ID NO: 31428 - protein, 25 aa, Homo sapiens
LSWKFQSCNDFWLVPRGLLDCCVKS

SEQ ID NO: 31429 - protein, 76 aa, Homo sapiens
IEMEENRTKEPIQMDAEHREVLPESLPVLHNQREFSMADFLLETTLSDFGQSHSTEEKVISDCECVPQKRADQSHR

SEQ ID NO: 31430 - protein, 38 aa, Homo sapiens
VAEVTVSKWKSLLSQQLLCKMPRPGIVAEHPRPAEVPP

SEQ ID NO: 31431 - protein, 33 aa, Homo sapiens
IPSEPLFAAPGEHLHQCFVKESYCPPRVLAKEQ

SEQ ID NO: 31432 - protein, 12 aa, Homo sapiens
LTAAGLGTAQPP

SEQ ID NO: 31433 - protein, 93 aa, Homo sapiens
ILLTPSTSPLARPECEEKGPARPASCVRRTPGGPTGRVGPGLARRVCEDRGPVLPGRRASGGEGPGPARPVREDWGPGPAPPPPPPPRWPSSR

SEQ ID NO: 31434 - protein, 38 aa, Homo sapiens
LHYLMRNLATKPLILSQRFGRNCFLSGSPEYPEESVWN

SEQ ID NO: 31435 - protein, 66 aa, Homo sapiens
RSVPLCCWHEHLQGLELLLSLEEYSQLKLKSTAQCSFGSYSVISGELQKSLSRPNVEVKFSNNVTS

SEQ ID NO: 31436 - protein, 24 aa, Homo sapiens
IMLLSNTCSQSPKGLYFFSVLNVI

SEQ ID NO: 31437 - protein, 382 aa, Homo sapiens
KLICEGNPYVLGIRDTDSAQEFQKQLTKAKRIMILGNGGIALELVYEIEGCEVIWAIKDKAIGNTFFDAGAAEFLTSKLIAEKSEAKIAYKRTRYTTEGRKKEARSKSKSDNVGSALGPDWHEGLNLKGTKEFSHKIHLEAMCEVKKIYLQDEFRILKKKSFTFPRDHTSVTTNTEMWPVYVELTNEKIYGCDFIVSATGVTPNIEPFLHGNSFDLGEDGGLKVDDHMHTSLPDIYAAGDICTTSWQLSPVWQQMRLWTQARQMGWYAAKCMAAASSGDSIDMDFSFELFAHVTKFFNYKVVLLGKYNAQGLGSDHELMLRCTKGQEYIKVVMQNGRMMGAFLIGETDLEETFENLILNQMNLSSYGEDLLDPNIDIEDYFD

SEQ ID NO: 31438 - protein, 33 aa, Homo sapiens
VDNYCTFLMEKVLFKVLFLIEYYQKGKKNDLNF

SEQ ID NO: 31439 - protein, 14 aa, Homo sapiens
IFSGRSYWNSPTRP

SEQ ID NO: 31440 - protein, 46 aa, Homo sapiens
RRGCAFPAPGPSRHTRSSPLARANAQDDHHPRVCHHLRLERSFMQG

SEQ ID NO: 31441 - protein, 37 aa, Homo sapiens
VVVYSSVELRAPWTSQVFRVFHLELYKVQKTWSLIPS

SEQ ID NO: 31442 - protein, 9 aa, Homo sapiens
KIIMAPASS

SEQ ID NO: 31443 - protein, 71 aa, Homo sapiens
IRAFRGSRALRAPPYPRGWRAAPEAPARLAVPRLPARASYSTRALNLSVTQALSPESLASWFKRNGRKGAM

SEQ ID NO: 31444 - protein, 28 aa, Homo sapiens
KNSCYDTEFNQEVMPHSIRNYATAEEVY

SEQ ID NO: 31445 - protein, 30 aa, Homo sapiens
KHLKALTSELASARDESKKTANDMIHAENM

SEQ ID NO: 31446 - protein, 9 aa, Homo sapiens
KRKYEDLEE

SEQ ID NO: 31447 - protein, 35 aa, Homo sapiens
MEITVPTPWAIGRISCEGMQCGVSGRQNSTNGSSG

SEQ ID NO: 31448 - protein, 136 aa, Homo sapiens [sequence omitted]

SEQ ID NO: 31449 - protein, 66 aa, Homo sapiens
MDKKSTHRNPEDARAGKYEDDPMFPSSSSSSSGSQTDSSIEDAAKGKIKKKRREKTNKWEKRKDKI

SEQ ID NO: 31450 - protein, 124 aa, Homo sapiens
MDKKSTHRNPEDARAGKYEGKHKRKKRRKQNQNQHRSRHRSVTSFSSDDPMFPSSSSSSSGSQTDSSIEDAAKGKIKKKRREKTNKWEKRKSLVLLLRLECNDATSAHCNLCLPDSSNSPATAS

SEQ ID NO: 31451 - protein, 20 aa, Homo sapiens
MPGSTQRTALIVFNFCTVCL

SEQ ID NO: 31452 - protein, 31 aa, Homo sapiens
MRIQDVTPRAHEGLPSVFKKRLYQTSMVAHA

SEQ ID NO: 31453 - protein, 4 aa, Homo sapiens
MMCC

SEQ ID NO: 31454 - protein, 252 aa, Homo sapiens
MAEGTSPQRRSVLPRVPEKQRGSASEPWPGSTAARLCQPLQLCFLLPGNGIDVTLGRGCCCFWKTWRHRALCPWAIFSARPSSESWCSPQIKESEGVVNDELPNCWECPKCNHAGKTGKQKRGPGFKYASNLPGSLLKEQKMNRDNKEGQEPAKRRSECEEAPRRRSDEHSKKVPPDGLLRRKSDDVHLRKKRKYEKPQELSGRKRASSLQTSPGSSSHLSPRPPLGSSLSPWWRSSLTYFQQQVLPRRTPS

SEQ ID NO: 31455 - protein, 43 aa, Homo sapiens [sequence omitted]

SEQ ID NO: 31456 - protein, 101 aa, Homo sapiens [sequence omitted]

SEQ ID NO: 31457 - protein, 306 aa, Homo sapiens
MDGRGAFWTVAIPRARQEGLGRLGLPFPVKRTPPAPQNPGGSTQAPQRVVGKSHSGIRMPAKSRNLRLESKLNRKVVKYKWGKQGSGAGRELVPAFPTNAGLGRRDRCRPPPAGGDVASHGLPGSGVGYSCNQREEGLRGGCGGIPHVPLFLSPLPLDASGQRPSSTYRQSLRRGLGTRAHQSPANEIPELGDLRGSRLAQEPAVLFGLRPSISKRGLLARRLWAQPMLLSGWVVSTTTTIITVTVTFTPTGLLCVKHSRGPLQPTCQESAPENRVGKGQCPSESSCRQKAGEVRSFVYLKGNKLL

SEQ ID NO: 31458 - protein, 120 aa, Homo sapiens
MLQDKRMEIDKHSLNIGDYNRTVGKGPGSRPQISKESSMERNPYFDKNGNPSMFGVGNTAAQPRGMQQPPAQPLSSSQPNLRAQVPPPLLSPQVNKLSLHSPVYLQKGSCMILYLNKMAN

SEQ ID NO: 31459 - protein, 29 aa, Homo sapiens
MLSVAVAEEEPPEICVGLSLRSKDSPRKS

SEQ ID NO: 31460 - protein, 71 aa, Homo sapiens
MSASAWTPWRQGPPCASEASTCQKIIFTPSLEKMALRLCTQRKEGEPQVSRRTMRLTEPAGRWRVSRALDI

SEQ ID NO: 31461 - protein, 36 aa, Homo sapiens
MLCKSSMSSWWKRGLRPSACSCCTAAWPRATSRAEN

SEQ ID NO: 31462 - protein, 97 aa, Homo sapiens
MLCKSSMSSWWKRGLRPSACSCCTAAWPRATSRAVSTTSPENCRHSSRAMAKPMPLLAPVTSATRLQDDMAERGARGTCVEGGPGFGPPGARPEEPS

SEQ ID NO: 31463 - protein, 70 aa, Homo sapiens
MGALEMHEQVEQLKQSIHRVHLYSRDTKKTRKKPRQKKPEPNLLWDRLTSPCLPPTLLPPLPLPPPWSPW

SEQ ID NO: 31464 - protein, 131 aa, Homo sapiens
MTKNPRTCAGAVSCYSGALGTKKGSGGKTVTLLRMFPRSSSAWERKGEIPVPGTPGQCFTCLSELTGPASPFPPLPIMMDGSLAFENRKHRTWHVGGNQKKSRHCREWVNHSGRVGPWQMAEAASQSPTWH

SEQ ID NO: 31465 - protein, 10 aa, Homo sapiens
MLALPPYKIT

SEQ ID NO: 31466 - protein, 30 aa, Homo sapiens
MEPHPLPPLGIWTHVFFLLRLQNCRDVFDF

SEQ ID NO: 31467 - protein, 287 aa, Homo sapiens [sequence omitted]

SEQ ID NO: 31468 - protein, 63 aa, Homo sapiens
MRVPGSTRTLPGPRWLLQARPGPVGPQRGDISLLGEKEIRATRRGLRAFPSRERRSGRPARTA

SEQ ID NO: 31469 - protein, 4 aa, Homo sapiens
MLVM

SEQ ID NO: 31470 - protein, 27 aa, Homo sapiens
MPLSPPHLGTASSKNSCYDTEFNQESA

SEQ ID NO: 31471 - protein, 15 aa, Homo sapiens
LDLTAALEVDLVLGP

SEQ ID NO: 31472 - protein, 31 aa, Homo sapiens
LQKQASNSLLRKKPDESAPFVCMPSPIRVLL

SEQ ID NO: 31473 - protein, 87 aa, Homo sapiens
LRSRVSPSLPPRKPGLFPRSLGLQHHACCSRQRAGSHRLCGSWLQRLWSCRASFCICSTARPSPSCSPEQLGGSVGGRRGMPVGLFH

SEQ ID NO: 31474 - protein, 5 aa, Homo sapiens
MNRNT

SEQ ID NO: 31475 - protein, 17 aa, Homo sapiens
LLMWVNLSLIQLLPYID

SEQ ID NO: 31476 - protein, 16 aa, Homo sapiens
MSHLVPMRMKAETSGA

SEQ ID NO: 31477 - protein, 322 aa, Homo sapiens
LPLTSRPASPNSAQEDRLPPPALMVVSGRRLLTALLQAQKWPFQPSRDMRLVQFWAPHLVGPHLGLETGNGRGIINLNAFDPTLPKTMTQFLEQGEATLSVARRALAAQLPVLPRSEVTFLAPVTWPDKVVCVGMNYVDHCKEQNVPVPKEPIIFSKFASSIVGPYDEVVLPPQSQEVDWEVELAVVIGKKGKHIKATDAMAHVAGFTVAHDVSARDWLTRCNGKQWLLGKTFDTFCPLGPALVTKDSVADPHNLKICCRVNGEVVQSSNTNQMVFKTEDLIAWVSQFVTFYPGDVILTGTPPPPPRCRCIQETSCLSQEGG

SEQ ID NO: 31478 - protein, 101 aa, Homo sapiens
RAGLTQANIILCDDAELILSIGNKPCDSVHCGGDLSLVVSDPLVSGCLFAFDVVACDSRTTIIFGPGPGQANRTLGYIEYFWRIAWRFWRICKYKWKAHMY

SEQ ID NO: 31479 - protein, 1147 aa, Homo sapiens
TTPLFPPISSLHTHFPFAEERRGGGERRDRRKREKFLTEISFRGCGGEEEGKKRAGRPLLPPSLLSLSFSPFLTRPPTPPAAGDAARESAGPGSVSSAAAAAAAALRLGIPKRRTPFLSFSRSARLSAFVPRGRPARRLRPSPCVRPSRPASLGLRLSTRAFLRTRGPARPLRPQRLPFPSPPLLPPPSPTLPTPFSCPEARCACACVCPSANAATSARQMNSVRAANRRPRRVSRPRPVQQQQQQPPQQPPPQPPQQQPPQQQPPPPPQQQQQQQPPPPPPPPPPLPQERNNVGERDDDVPADMVAEESGPGAQNSPYQLRRKTLLPKRTACPTKNSMEGASTSTTENFGHRAKRARVSGKSQDLSAAPAEQYLQEKLPDEVVLKIFSYLLEQDLCRAACVCKRFSELANDPILWKRLYMEVFEYTRPMMHPEPGKFYQINPEEYEHPNPWKESFQQLYKGAHVKPGFAEHFYSNPARYKGRENMLYYDTIEDALGGVQEAHFDGLIFVHSGIYTDEWIYIESPITMIGAAPGKVADKVIIENTRDSTFVFMEGSEDAYVGYMTIRFNPDDKSAQHHNAHHCLEITVNCSPIIDHCIIRSTCTVGSAVCVSGQGACPTIKHCNISDCENVGLYITDHAQGIYEDNEISNNALAGIWVKNHGNPIIRRNHIHHGRDVGVFTFDHGMGYFESCNIHRNRIAGFEVKAYANPTVVRCEIHHGQTGGIYVHEKGRGQFIENKIYANNFAGVWITSNSDPTIRGNSIFNGNQGGVYIFGDGRGLIEGNDIYGNALAGIQIRTNSCPIVRHNKIHDGQHGGIYVHEKGQGVIEENEVYSNTLAGVWVTTGSTPVLRRNRIHSGKQVGVYFYDNGHGVLEDNDIYNHMYSGVQIRTGSNPKIRRNKIWGGQNGGILVYNSGLGCIEDNEIFDNAMAGVWIKTDSNPTLRRNKIHDGRDGGICIFNGGRGLLEENDIFRNAQAGVLISTNSHPILRKNRIFDGFAAGIEITNHATATLEGNQIFNNRFGGLFLASGVNVTMKDNKIMNNQDAIEKAVSRGQCLYKISSYTSYPMHDFYRCHTCNTTDRNAICVNCIKKCHQGHDVEFIRHDRFFCDCGAGTLSNPCTLAGEPTHDTDTLYDSAPPIESNTLQHN

SEQ ID NO: 31480 - protein, 16 aa, Homo sapiens
MSHLVPMRMKAETSGA

SEQ ID NO: 31481 - protein, 14 aa, Homo sapiens
MLPLICHHPVSMIG

SEQ ID NO: 31482 - protein, 7 aa, Homo sapiens
LDPQPGA

SEQ ID NO: 31483 - protein, 227 aa, Homo sapiens
LSRGRGAGGMALVPYEETTEFGLQKFHKPLATFSFANHTIQIRQDWRHLGVAAVVWDAAIVLSTYLEMGAVELRGRSAVELGAGTGLVGIVAALLGAHVTITDRKVALEFLKSNVQANLPPHIQTKTVVKELTWGQNLGSFSPGEFDLILGADIIYLEETFTDLLQTLEHLCSNHSVILLACRIRYERDNNFLAMLERQFTVRKVHYDPEKDVHIYEAQKRNQKEDL

SEQ ID NO: 31484 - protein, 371 aa, Homo sapiens
KTEVKEEPELQTKREMEERTVTLEIPEVLKRQLEDDCYYINRRKRLVQLPCHTNIITILESYVKHFAISAAFSANERPRHHHAMPHASMNVPYIPAEKNIDLCKEMVDGLRITFDYTLPLVLLYPYEQAQYKKVTASKVFLAIKESATNTNRSQEKLSPSLRLLNPSRPQSTESQSTSGEPATPKRRKAEPQAVQSLRRSSPHTANCDRLSKSSTSPQPKRWQQDMSTSVPKLFLHLEKKTPVHSRSSSPTLTPSQEGSPVFAGFEGRRTNEINEVLSWKLVPDNYPPGDQPPPPSYIYGAQHLLRLFVKLPEILGKMSFTEKNLKALLKHFDLFVRFLAEYHDDFFPESAYVAASEVHYSTRNPQAVNKC

SEQ ID NO: 31485 - protein, 12 aa, Homo sapiens
VAATMMEKRNLH

SEQ ID NO: 31486 - protein, 4 aa, Homo sapiens
MACS

SEQ ID NO: 31487 - protein, 100 aa, Homo sapiens
TATSGWPRGALARLFLRPRGPRSPIIQFRRVTGAAVASQGAGSLSPALLPLAPSPRPRRAGLRGQGPSGEGYHLTWKKMSSLEKKHSNVIVQNSLNIHNR

SEQ ID NO: 31488 - protein, 145 aa, Homo sapiens
KLRRRPNDPVPIPDKRRKPAPAQLNYLLTDEQIMEDLRTLNKLKSPKRPASPSSPEHLPATPAESPAQRFEARIEDGKLHYDKRWYHKSQAIYLESKDNQKLSCVISSVGANEIWVRKTSDSTKMRIYLGQLQRGLFVIHRRSAA

SEQ ID NO: 31489 - protein, 32 aa, Homo sapiens
ISLKDHLLSHFRPSCSHQNLPHEMKGSPLHRL

SEQ ID NO: 31490 - protein, 58 aa, Homo sapiens
RKLRDGATAPLLPACVRKVSLRGAPAPASGGEGGTCRGRSSEALGPLCSPAIARAALT

SEQ ID NO: 31491 - skipped

SEQ ID NO: 31492 - protein, 29 aa, Homo sapiens
MLKYRFPAGTMALSSVAQWSSSEDAKVRA

SEQ ID NO: 31493 - protein, 49 aa, Homo sapiens
LEGVRNFQFWAWAVGLADRPLALGLGARFSASRMRSFAVHQDLGPSGIS

SEQ ID NO: 31494 - protein, 52 aa, Homo sapiens
LEEEVLLKTLRPARLCPWCPGCLESLTPGPWGQDSRTLTTCPPPASAAAPPR

SEQ ID NO: 31495 - protein, 37 aa, Homo sapiens
KSFIGPPLETSDRSHRRLASGICPHPRGQLTMSQALC

SEQ ID NO: 31496 - protein, 19 aa, Homo sapiens
LAPRLLPSLRAQSPFGRAS

SEQ ID NO: 31497 - protein, 73 aa, Homo sapiens
LALRGLGDWAAGLRVRGGGRLRPGASWPREPRDGGPGRGGGAAGVSLGGEGAAGPARFPARKLREAWTSAHWR

SEQ ID NO: 31498 - protein, 17 aa, Homo sapiens
MQRPGCGPSPVPGGWLE

SEQ ID NO: 31499 - protein, 80 aa, Homo sapiens
RASGDRQGEMTELDETRGRAGGARRKLGKETRSRGTTVGQAAWKISAGSPRQNSHAPGQAVPTAWWRGNLTSGRAPLLHS

SEQ ID NO: 31500 - protein, 17 aa, Homo sapiens
LMTVCLYLTEQLVAIYH

SEQ ID NO: 31501 - protein, 28 aa, Homo sapiens
LLFTSKKVPLRTGCQFVLLCWLLMKIIK

SEQ ID NO: 31502 - protein, 51 aa, Homo sapiens
TECINETLYMDTRAFKTALPACRAFAVLQRFTGVIALKPRNNFTSDSTRKE

SEQ ID NO: 31503 - protein, 32 aa, Homo sapiens
VWDSRQERLRLPRTGTFATHQILAPGSRERTG

SEQ ID NO: 31504 - protein, 17 aa, Homo sapiens
RPLFFLFCLSNSTQRSS

SEQ ID NO: 31505 - protein, 6 aa, Homo sapiens
MNDFRV

SEQ ID NO: 31506 - protein, 40 aa, Homo sapiens
LDSILPHQSPAWGPWGCKDLSSGVPSFLTSSILWKSAVVK

SEQ ID NO: 31507 - protein, 22 aa, Homo sapiens
TASSLRPLVMMRPFFVWHLQRR

SEQ ID NO: 31508 - protein, 42 aa, Homo sapiens
MMVQSASVSKAGKGSSSSHGVAAALNQDLDPDPKCHVFNVSK

SEQ ID NO: 31509 - protein, 40 aa, Homo sapiens
MVQSASVSKAGKGSSSSHGVAAALNQDLDPDPKCHVFNVS

SEQ ID NO: 31510 - protein, 59 aa, Homo sapiens
VAFEDVAVNFTPDEWALLDPSQKNLYREVMQETLRNLASIEVLWKRDSLKVKVISMEKF

SEQ ID NO: 31511 - protein, 46 aa, Homo sapiens
RKRQKCVFHLEHPEGAQPYQHLDFDPVTLILDLWPPELLENKFALF

SEQ ID NO: 31512 - protein, 558 aa, Homo sapiens
RHTQGLGRAGGHTAWLSCSWSPASPRRPGGSISQEARSPPGGWAQPRQMDEKTKKAEEMALSLTRAVAGGDEQVAMKCAIWLAEQRVPLSVQLKPEVSPTQDIRLWVSVEDAQMHTVTIWLTVRPDMTVASLKDMVFLDYGFPPVLQQWVIGQRLARDQETLHSHGVRQNGDSAYLYLLSARNTSLNPQELQRERQLRMLEDLGFKDLTLQPRGPLEPGPPKPGVPQEPGRGQPDAVPEPPPVGWQCPGCTFINKPTRPGCEMCCRARPEAYQVPASYQPDEEERARLAGEEEALRQYQQRKQQQQEGNYLQHVQLDQRSLVLNTEPAECPVCYSVLAPGEAVVLRECLHTFCRECLQGTIRNSQEAEVSCPFIDNTYSCSGKLLEREIKALLTPEDYQRFLDLGISIAENRSAFSYHCKTPDCKGWCFFEDDVNEFTCPVCFHVNCLLCKAIHEQMNCKEYQEDLALRAQNDVAARQTTEMLKVMLQQGEAMRCPQCQIVVQKKDGCDWIRCTVCHTEICWVTKGPRWGPGGPGDTSGGCRCRVNGIPCHPSCQNCH

SEQ ID NO: 31513 - protein, 47 aa, Homo sapiens
LGVSHDCRPMCVRGVLWESMDPEVPGLSADLCPVCPVAPGDVSSRRG

SEQ ID NO: 31514 - protein, 86 aa, Homo sapiens [sequence omitted]

SEQ ID NO: 31515 - protein, 13 aa, Homo sapiens
VFARKGIVRCLGG

SEQ ID NO: 31516 - protein, 178 aa, Homo sapiens
VTLFLKGSPKNGKVVAVYGTLSDLLSVASSKLGIKATSVYNGKGGLIDDIALIRDDDVLFVCEGESFIDPQTDSKPPEGLLGFHTDWLTLNVGGRYFTTTRSTLVNKEPDSMLAHMFKDKSVWGNKQYHRGAFLIDRSPEYFEPILNSLRHGQLIVNDGINLLGVLEEARFFGIVSLI

SEQ ID NO: 31517 - protein, 6 aa, Homo sapiens
MLAESS

SEQ ID NO: 31518 - protein, 107 aa, Homo sapiens
MRNRHCIQCTGPYIIYNEDNGIIKAFRNIPGITLLNVSKLNILKLAPGGHVGLFCIWTKSAFQKLDEFNGTWRKASSLKSNYNLPIHKMINTDLSRILKSPEIQRAL

SEQ ID NO: 31519 - protein, 25 aa, Homo sapiens
MEKVLFKVLFLIEYYQKGKKNDLNF

SEQ ID NO: 31520 - protein, 149 aa, Homo sapiens
MFRKARRKLIYEKAKHFHEEYRQMYRSEIRMARMARKAGNFYVSSEPKLAFVIRTRGVNGVSPNVRKVLQLLRLYQIFNGIFVKLRKASINMLRIVDPYIAWGYSNLKSVNELICKHGYGKINKKRNALTDNALIARSLDKYDIICMEI

SEQ ID NO: 31521 - protein, 54 aa, Homo sapiens [sequence omitted]

SEQ ID NO: 31522 - protein, 235 aa, Homo sapiens [sequence omitted]

SEQ ID NO: 31523 - protein, 30 aa, Homo sapiens
MSSWWKRGLRPSACSCCTAAWPRATSRAEN

SEQ ID NO: 31524 - protein, 67 aa, Homo sapiens
MWQRPEPGERLVRKRLRRNLESAGVSRQNPFGQGEGERGKGLVLLFKQEEDYKPPSTICQVILNQST

SEQ ID NO: 31525 - protein, 865 aa, Homo sapiens
MHFLKGLAEYHQAKESCNMETQTSSTFSRDSLAEKLQLIDDQFADAYPQRIKFESLEIKLNEYKREIEEQLREEICQKLKFFKDTEIGKIKMEAKKKYEKELAVFQNDFEKACQAKSEALVIREKSTLERIQKHQEIETKEIYAQRQLLLKDMDLLRGREAELKQRVEAFELNQKLQEEKHKSMTEALRRREQNIKSFEKTYDQKLKNELLKYQLELKDDYIIRTNRLIEDERKNKEKAVHLQEELIAFNSKKEELNQSINRMKELELELESVKAQSLAITKQNHMLNEKVKVMSDYSLLKEERLELLAQNKLLKQQLEESRNENLRLLNRLAQLAPELAVFQKELRRAEKATVVEHEEFESRKQALHKQLQDEIEHTTQLKAQILGYKVSIKRLTIQVADLKSQLKQTQTALENEVYCNPKQSVIHHSANGLINGNMVLHNGEISGDFLNNPFKQEKVLAGTVASRITNYPNAGMEGSSPDSDLEFVANTNARVKQLQQEAERLEKAFRSYHRRDIKNSAKGPLPAKSPPSLHLLEAFKNITSSSPERRIFAEDRVVSEQPQVGTLKEERNDILEALTGSAASRLCGGTSSRRLSSTPLPKAKRSLESEIYLEGLGRSHIASPSPYPDRMPPPSPAESRHNLSIPPFSSPPEQKAGLYWRQNELQDKSEFSDADKLAFKDNEEFESSFEYARNVPRQFEMDGPSPAGDMLHMGAAVAAVPLSYQHPSVDQKQIEEQKEEEKIWEQQVKERKQREERRQSNLQEILERERRELEKLYQERRMTEESLKIEMENELEMSNQEMKDKSAHSENPLEKYMKIIQQDQESADKSSKKMVQEGSLVDTLQCSDKVESLTRFSHEEPDDSW

SEQ ID NO: 31526 - protein, 49 aa, Homo sapiens
MPASASGDNLKKFTIGRVRWLMPVMPALREAETDGSFEVRSSRPGWPTW

SEQ ID NO: 31527 - protein, 140 aa, Homo sapiens
MCQARIALDSSPSWNSYGTLAPETTNSSLKFSNSNNGISDLAFLYFSHVNKIGSASTMGYMLSYRVSLCRPGWSAVARDLGSLQAPPPGFTPFSCLSLLSSWDYRRPPPHPGTKPIRRCQKIRIFVLMLHLPAVPQCSTS

SEQ ID NO: 31528 - protein, 127 aa, Homo sapiens [sequence omitted]

SEQ ID NO: 31529 - protein, 215 aa, Homo sapiens
MRHNKQATENTKEEVRQILGLLDAHLKTRTFLEGERVTLTDITVVCTLLWLYKQVLEPSFCQAFPNTNRWFLTCINQPQFCTVLGKAKLCEKMAQSDAKKFVESQPKKDTPRKEKRSREEKQKPQAEQEEKKAAAPTPEEEMDECEQALAAEPKAKDPFAHLPKSTFVLDELKLKYSNETHSLWHCHISGSTLIRTAGPCGTQSVASLKNSLRPS

SEQ ID NO: 31530 - protein, 187 aa, Homo sapiens
MIKVIGVTKGKGYKGVTSCWHTTKLPHKTHRGLCKVACIGAWHLAHVAFSVSHAGQKGYHHGTEINKKIYKIGQGYPIMDGKLIKNNASIDYDLSDKSINSLGGFVHCGKVTNDFVMLKGYVVGTKKQVLTLCKSLLVQTKWQALEKTDLKFTDTTSNFGHCHFQTMKKKAFVRPLKKDQIAKEEGA

SEQ ID NO: 31531 - protein, 38 aa, Homo sapiens
LALTFNFRVLYIEGRVGKLIFFFNREGLTIFGRLGAKD

SEQ ID NO: 31532 - protein, 93 aa, Homo sapiens
MASCDFSIRTYTYADTPDDFQLHNFSLPEEDTKLKIPLIHRALQLAQRPVSLLASPWTSPTRLKTRGAGNGKGPLKGQPRDIYHQTWARYIVK

SEQ ID NO: 31533 - protein, 24 aa, Homo sapiens
IKFLQVWRVGLTTLCGASFKEAKV

SEQ ID NO: 31534 - protein, 15 aa, Homo sapiens
MWVNLSLIQLLPYID

SEQ ID NO: 31535 - protein, 66 aa, Homo sapiens
ILSSVLEFSSAQTISATDRICENTSMSRLGIILRHHLASPASHFKMQSVHMRRDFPLSPSSVISLP

SEQ ID NO: 31536 - protein, 40 aa, Homo sapiens
IIFGPGPGQANRTLGYIEYFWRIAWRFWRICKYKWKAHMY

SEQ ID NO: 31537 - protein, 38 aa, Homo sapiens
VDQQRLQSPASFPTLMNCILKRTLSDWLCRLPVLEQDG

SEQ ID NO: 31538 - protein, 29 aa, Homo sapiens
IEGFKRLDCQSAMFNDYNFVFTSFAKKQQ

SEQ ID NO: 31539 - protein, 58 aa, Homo sapiens
LIGYRELFFSPLSLSFPPSCCMQENYSPLLARPGCEIFSPALSRALCNPKMKDRRGES

SEQ ID NO: 31540 - protein, 172 aa, Homo sapiens
LKTDNRPEKSKYKPLWGKVFYLDLPSVTISEKLQKDIKDLGGRVEEFLSKDISYLISNKKEAKFAQTLGRISPVPSPESANTAETTSPHPSHDGSSFKSPDTVCLSRGKLLVEKAIKDHDFIPSYSILSNALSWGVKILHIDDIRYYIEQKKKVAFTQEIKYFSKRWGQKSW

SEQ ID NO: 31541 - protein, 75 aa, Homo sapiens
VLPIKGSHVEFGMWKGGRSHPFLPCSSRRAGSGGQLDSILPHQSPAWGPWGCKDLSSGVPSFLTSSILWKSAVVK

SEQ ID NO: 31542 - protein, 416 aa, Homo sapiens
IERQRKMLAKRKPPAMGQAPPATNEQKQWKSKTNGAENETLTLKEYHEQEEIFKLRLGHLKKEEAEIQAELERLERVRKLHIREVKRIHNEDNSQFKYHPTLNDRYLLLHLLGRGGFSEVYKAFDLTEQRYVAVKIHQLNKNWRDEKKENYHKHACREYRIHKELDHPRIVKLYDYFSLDTDSFCTVLEYCEGNDLDFYLKQHKLMSEKEARSIIMQIVNALKYLNEIKPPIIHYDLKPGNILLENGTGCGEIKITDFGLSKIMDDDSYNSVDGMELTSQGAGTYWYLPPECFVVGKEPPKISNKVDVWSVGVIFYQCLYGRKPFGHNQSQQDILQENTILKATEVQFPPKPVVTPEAKALIRRCLAYRKEDRIDVQQLACDPYLLPHIQKSVSTSSPAGAAIASTSGASNNSSSN

SEQ ID NO: 31543 - protein, 153 aa, Homo sapiens
RHTQGLGRAGGHTAWLSCSWSPASPRRPGGSISQEARSPPGGWAQPRQMDEKTKKAEEMALSLTRAVAGGDEQVAMKCAIWLAEQRVPLSVQLKPEVSPTQDIRFLMVQNGHSSSIQPSHHRRKGRKTPLHTLLKSIAQKLYTLLPLIPVDQN

SEQ ID NO: 31544 - protein, 23 aa, Homo sapiens
ILFTPVGMEPPMDRNSSWLMLSR

SEQ ID NO: 31545 - protein, 22 aa, Homo sapiens
MVNSYPWAYPFIIFNKPAFSPG

SEQ ID NO: 31546 - protein, 69 aa, Homo sapiens [sequence omitted]

SEQ ID NO: 31547 - protein, 104 aa, Homo sapiens [sequence omitted]

SEQ ID NO: 31548 - protein, 67 aa, Homo sapiens
MEFLTRNIALELQREKAPLQVRWQTTSGWKCISSSPSLLPCDLLQIRERQREEQKNRRMEWQREEKE

SEQ ID NO: 31549 - protein, 17 aa, Homo sapiens
MSTPAHRDGIPNPEYCP

SEQ ID NO: 31550 - protein, 28 aa, Homo sapiens
MGLVARVSQTRERHSPSIDSSSVFKREI

SEQ ID NO: 31551 - protein, 33 aa, Homo sapiens
MPGNRRDAVRKATGCRSWKGPTAVHEGGMDSEL

SEQ ID NO: 31552 - protein, 76 aa, Homo sapiens
MPGNRRDAVRKATGCRSWKGKVGGRATISPTPRVSAPRTPGPRKGIAVWTPRGVPLMRGRAGLGTARTRGDRREAT

SEQ ID NO: 31553 - protein, 131 aa, Homo sapiens
MSKRKWRGFRGAQQERAQPPAASPQPCPAPHAGLPGGSRRRAPAPAGQQQMRAESRSGAQRRRGSARRGAHREAGGCVRGRTRSSGSERSNALWQAVDAAEGRRRRGADLALTPLAGEGHTRWRQPGRPGK

SEQ ID NO: 31554 - protein, 168 aa, Homo sapiens
MSKRKWRGFRGAQQERAQPPAASPQPCPAPHAGLPGGSRRRAPAPAGQQQMRAESRSGAQRRRGSARRGAHREAGGCVRGRTRSSGSERSNALWQAVDAAEALALSSPLRRPWDQAQHFTNPAPFSKGPQSAPPSPPAGRRRRGADLALTPLAGEGHTRWRQPGRPGK

SEQ ID NO: 31555 - protein, 131 aa, Homo sapiens
MPRNQLKPGLQLGWTCPPAAEGQDARSGGRDKQDMTWSGVTARTEEARPAFLNTLGWWGCGKKRVCFFTSSTESAHYGCPLGSQNPQHERNGATQLKPGPLNPDTKPSSLEMNMLHFTTTALPDSGIGSGR

SEQ ID NO: 31556 - protein, 17 aa, Homo sapiens
MASLYTLCLSFQVSAGP

SEQ ID NO: 31557 - protein, 55 aa, Homo sapiens
MFTRPEMPRPRPGREKAEMEDRRLPYKYAHWREKCCNLNQQLHPSSLGPKPVPTW

SEQ ID NO: 31558 - protein, 60 aa, Homo sapiens
MWTRLWMETDRILAWGPSGRAGCWAGRLWRSPSPELTLFLAAMVAALTTFCLHLCTKKSK

SEQ ID NO: 31559 - protein, 42 aa, Homo sapiens [sequence omitted]

SEQ ID NO: 31560 - protein, 84 aa, Homo sapiens [sequence omitted]

SEQ ID NO: 31561 - protein, 70 aa, Homo sapiens [sequence omitted]

SEQ ID NO: 31562 - protein, 34 aa, Homo sapiens
MCTKVYVQRGSEITFARAKTLRPMRVFINRRMVK

SEQ ID NO: 31563 - protein, 17 aa, Homo sapiens
MPQPGGLISSNLGDRDL

SEQ ID NO: 31564 - protein, 17 aa, Homo sapiens
MRGHSMSQDIGGTQTLL

SEQ ID NO: 31565 - protein, 37 aa, Homo sapiens
MSLNLLQPGHRRYPDIVMKLRMCPWWTLLDPACTLLG

SEQ ID NO: 31566 - protein, 74 aa, Homo sapiens
MHTSRLRVTLDEPPLPAGSMLQLSHAVDENEGYDHCVGGVCVAIAGITCGIVERLSVGKKTHSEVTPIYVKLSP

SEQ ID NO: 31567 - protein, 72 aa, Homo sapiens
MHTSRLRVTLDEPPLPAGSMLQLSHAVDENEGYDHCVGGVCVAIAGITNAEDKASKQKNFQKNHRVLDLEKN

SEQ ID NO: 31568 - protein, 29 aa, Homo sapiens
MKDFSRTQGHTLEVLQLKGGTPWPPQPIT

SEQ ID NO: 31569 - protein, 84 aa, Homo sapiens
MEAAEEALMGPTIPDPSLLPGGPLVSFLVWAEAITWMPTWEGTSNVGPQPLSSSKSLHSHGDTLHLFPRDRLDPETLDPGPPLE

SEQ ID NO: 31570 - protein, 85 aa, Homo sapiens
MAFSFLRVCPAPHSNVGCCFSPAGCSWQGRCALGFAVPVAAVRGRSVCPEGFLQTFILHSHGDTLHLFPRDRLDPETLDPGPPLE

SEQ ID NO: 31571 - protein, 82 aa, Homo sapiens [sequence omitted]

SEQ ID NO: 31572 - protein, 85 aa, Homo sapiens
MNELWHWKNLGSNPGYSTSCVSCFTFLNINCVPSVLASRKPRAKRMATSDHSTSPAWCTFLGSLSRLPSIAFIFLLPIKPVLFSF

SEQ ID NO: 31573 - protein, 32 aa, Homo sapiens
MKPDSTTMFQVTYVSQAHETHTTPVSVKPHKI

SEQ ID NO: 31574 - protein, 26 aa, Homo sapiens
MWNWKLFFPLWGLREIGGKDSWEEKS

SEQ ID NO: 31575 - protein, 70 aa, Homo sapiens
MAPKSFPCRQARPGRTSGCLASLSWDRPRRRAQPSPRPHPTPRLTAGVPGQLRKPPRNRIPCARENFSRG

SEQ ID NO: 31576 - protein, 16 aa, Homo sapiens
MHRRRVREFSPSQLDY

SEQ ID NO: 31577 - protein, 19 aa, Homo sapiens
MLSPRVGSPASFTQLLSRF

SEQ ID NO: 31578 - protein, 122 aa, Homo sapiens
MAEPGGRGDYRKDGRLPSLSRSPLSTTLGTSPACGLEIPPTSGARPDGSCSLPAPVYHLKSRQWKGMGRGHRQRWRLQGRGDCDMGCVVQASGLFPAEMRERTTKKMATSPLDLCAGACWEM

SEQ ID NO: 31579 - protein, 104 aa, Homo sapiens
MATAALWPPLHPDGAWPGRSILESEASTCVSLKPLRACPAVLLPSSTSGSSLSSQHCGRPRRVDHLRTGVQDQPGQHGVSASGEAPGSFQPWWKAKREQVSHMA

SEQ ID NO: 31580 - protein, 110 aa, Homo sapiens
MATAALWPPLHPDGAWPGRSILESEASTCVSLKPLRACPAVLLPSSTSGSSLSSQHCGRPRRVDHLRTGVQDQPGQHGYMESTGVSASGEAPGSFQPWWKAKREQVSHMA

SEQ ID NO: 31581 - protein, 66 aa, Homo sapiens
MKENSASSLLSKPRGPGDNLRALKCFNTMYQLDFSTCPLDCPKAKSQRGQGPSRAGSLRASYRAAP

SEQ ID NO: 31582 - protein, 71 aa, Homo sapiens
MIHGSVQKFIRLSDLRAVGEGFSSRTDGEGSCSPSSTFFASIIHKNTFGRAKNEHCRSLQPCFVTQMHSLL

SEQ ID NO: 31583 - protein, 25 aa, Homo sapiens
MSLLLLRGARHLVTCHFRICVNQTI

SEQ ID NO: 31584 - protein, 18 aa, Homo sapiens
MPQDFYFTYCCLCKPRQP

SEQ ID NO: 31585 - protein, 57 aa, Homo sapiens
MGLIVERKPCSFLRSIKVFRNCQGCWCGWTLMQPRLENTLLHSIGAHVTASFWSLWS

SEQ ID NO: 31586 - protein, 27 aa, Homo sapiens
MTCLGKDMKTVPVIPFKGTCFIDVNVN

SEQ ID NO: 31587 - protein, 51 aa, Homo sapiens
MRRSSRSFRLQCTGFPSSSAQSISAHLSNSMPSSLLTISRCPGMFAVRCPL

SEQ ID NO: 31588 - protein, 89 aa, Homo sapiens
MRRSSRSFRAPGVREPPFRPGLRSLPCSCFYHHPSPPNPVDPLVSPSLQCTGFPSSSAQSISAHLSNSMPSSLLTISRCPGMFAVRCPL

SEQ ID NO: 31589 - protein, 55 aa, Homo sapiens
MGQTRTPSSAELRKSPATSLVRTVEALQTAIKLQPVTQPEPLRMAPSAGNPYMGL

SEQ ID NO: 31590 - protein, 42 aa, Homo sapiens
MEDRCFPHFSFSPKKVLLLSPFKQPVSLNFCGHGTDKDPVFS

SEQ ID NO: 31591 - protein, 68 aa, Homo sapiens
MLCVFLFLYFVSSTKLAEKNAFVYFSCWVVRRKGREAKGLPLRRCSARSRPHVPPPPEKRAPVHLGSL

SEQ ID NO: 31592 - protein, 36 aa, Homo sapiens
MHCVVSLTEFSFGGGGREGKPKPRFLLLLLLIVLAK

SEQ ID NO: 31593 - protein, 29 aa, Homo sapiens
MKSQVENYTMAFTILVLYQYINWFIISFY

SEQ ID NO: 31594 - protein, 41 aa, Homo sapiens
MEPNLFKVINVNPKVHGTISPSLLRTVCFTSWAFAAWGFLM

SEQ ID NO: 31595 - protein, 33 aa, Homo sapiens
MVPVQMGAVCEYRAQEKGRRSVNIRNCKILLNQ

SEQ ID NO: 31596 - protein, 18 aa, Homo sapiens
MTLHQIAPGHFPQSFQQI

SEQ ID NO: 31597 - protein, 58 aa, Homo sapiens
MDQIRLGLTKAESCSHSRHHFCHENIGPFQNMPSGRCSLFKQKSNDCITLLDHILHFL

SEQ ID NO: 31598 - protein, 47 aa, Homo sapiens
MVLRPLSKTFSSMSRFLCGNSDTCSGVLSFLRELKGYKAPENVLYAG

SEQ ID NO: 31599 - protein, 19 aa, Homo sapiens
MGCVPLCQDSACGWSTVPA

SEQ ID NO: 31600 - protein, 26 aa, Homo sapiens
MDFTSGLWLHQFTGNGIKMVQLRHDH

SEQ ID NO: 31601 - protein, 25 aa, Homo sapiens
MGDFSCLRGPWTGKASLASLCPCLE

SEQ ID NO: 31602 - protein, 43 aa, Homo sapiens [sequence omitted]

SEQ ID NO: 31603 - protein, 33 aa, Homo sapiens
MQDLTQEFAVQTGCCGSCTFFFPREWGLALTAL

SEQ ID NO: 31604 - protein, 20 aa, Homo sapiens
MTKRDRQCQYAFWRQHVPHT

SEQ ID NO: 31605 - protein, 21 aa, Homo sapiens
MDMKSEESDHRRKPFQVSDDL

SEQ ID NO: 31606 - protein, 65 aa, Homo sapiens
MHFSQCKCLSSSPVLDSCPHSRVLTASSEDMLRELPDSPDSGLPVDEDSTVVTKNKTWQMVLGQD

SEQ ID NO: 31607 - protein, 76 aa, Homo sapiens
MSRLGIILRHHLASPASHFKWVTRMELRCCLQEKLTTGFYFSNLIGGYAGTVSRLSIFNPVSKNFFTTITFRFLPL

SEQ ID NO: 31608 - protein, 63 aa, Homo sapiens
MSRLGIILRHHLASPASHFKEHLEMKTRKMSVSTLSNKLERKQLFFSFTKTYQMGTAQPSLEM

SEQ ID NO: 31609 - protein, 61 aa, Homo sapiens
MSRLGIILRHHLASPASHFKWVTRMELRCCLQEKLTTGFYFSNLIGGYAENRRLDGSSGSS

SEQ ID NO: 31610 - protein, 36 aa, Homo sapiens
MSRLGIILRHHLASPASHFKRIDALMAPLAVLDDHG

SEQ ID NO: 31611 - protein, 87 aa, Homo sapiens
MKQHTPLFLSAQGKQIWGPLHLCVGKHRWYNPLLSRPTLHSQKLRPCSWCTQHGDHRIWFATERNLDADHFTSESMNCSHAFKSFSG

SEQ ID NO: 31612 - protein, 46 aa, Homo sapiens
MCYYWGGWSSKKRRRKKRAGLCWQRLSAGLTCGGDGRTYGVRLQVF

SEQ ID NO: 31613 - protein, 36 aa, Homo sapiens
MRLSLCLSDEYIFVYNISIIATFMYNLSKSDVIHAS

SEQ ID NO: 31614 - protein, 42 aa, Homo sapiens
MLLFPHPSGTPVPTKTLGDFEVRAPRFPESVVWLVSVFPWFN

SEQ ID NO: 31615 - protein, 35 aa, Homo sapiens
MTAVELQSCRDIQVLVSVDELSMKILNAGVYENTN

SEQ ID NO: 31616 - protein, 66 aa, Homo sapiens
MSSTTQTPTALTQPVHSCLFTHTAPDCFLQRLRVPPPPFFSFRCNKPSSLCSSIVCISLYFIHVLF

SEQ ID NO: 31617 - protein, 58 aa, Homo sapiens
MTAPLTNWSLVWGGHHCPSGTLSTPWSPPLPLRTCAKLPSCSHQNLPHEMKGSPLHRL

SEQ ID NO: 31618 - protein, 29 aa, Homo sapiens
MNRQSNQPKTGGSSRPARRHLLLPSLEAL

SEQ ID NO: 31619 - protein, 62 aa, Homo sapiens
MLKYRFPAGTMALSSVAQWSSSEDAKLVESMDMKPTDIEGWPGAVAHACNPSTLGGQGGWIT

SEQ ID NO: 31620 - protein, 82 aa, Homo sapiens [sequence omitted]

SEQ ID NO: 31621 - protein, 110 aa, Homo sapiens
MVGLSLPTVREVRRGNARGHSAGVDPLPTAGAQPLSVDPTGARPLNPALGVLRAPRGALLGGSAAPRVPRSRGPECASPRLESESGGLLRAGGRAPKSALPPMRWPWGRR

SEQ ID NO: 31622 - protein, 46 aa, Homo sapiens
MNSLSSPLPRTPGYLPLATLPPRLSLLSGREKVSERLVDCSGGNVP

SEQ ID NO: 31623 - protein, 26 aa, Homo sapiens
MHQLMMTAESGRAEDPKSFPRLAESE

SEQ ID NO: 31624 - protein, 59 aa, Homo sapiens
MLGSLAPDPGSRRHSGQAALRPRRYPTLWDRCRKRWLRPIFTQLLAAGLTTKDSESWQV

SEQ ID NO: 31625 - protein, 23 aa, Homo sapiens
MLYCSTLKYLPPIIEKTCFRAID

SEQ ID NO: 31626 - protein, 92 aa, Homo sapiens
MTRQRQRHRGCPAAHRSTHLPGLLELRTRETMQLRQALGCFRGADIRGDFSWEVQQPSLAHRALGKTRLRLKPPRKAKSEFHFLKRPARVRL

SEQ ID NO: 31627 - protein, 53 aa, Homo sapiens
MLAGGPPGARGEAGVRPHAACLCSIAGSSFSSVQRAVRAQLSSPPPTRSSPGG

SEQ ID NO: 31628 - protein, 62 aa, Homo sapiens
MRRTCPGRVGVCSLPLVPGTSLDPLPCCRREMTGNGVFSETGPACKSFKVNGMKCIPIVRKK

SEQ ID NO: 31629 - protein, 50 aa, Homo sapiens
MLAVLSVGNRAKYMGLKLILQVRKWRSREKSDSPKLKTVAGRKARTELGC

SEQ ID NO: 31630 - protein, 29 aa, Homo sapiens
MEEEKTQLQPTSAILSHIKGKWKKPEKQA

SEQ ID NO: 31631 - protein, 20 aa, Homo sapiens
MLKLHLLAIVIVPSHSPEIF

SEQ ID NO: 31632 - protein, 81 aa, Homo sapiens
MRVYSPEIFFFFLRQNLSPRLGCSGIILAHCNLCLPGSSDPPSLASMSSWDHRCAPPHPANYFVFFAEGGFTTLPKLVSNS

SEQ ID NO: 31633 - protein, 23 aa, Homo sapiens
MAPSRQTAMPHVQDGRITISFNS

SEQ ID NO: 31634 - protein, 30 aa, Homo sapiens
MCISHLERRSSCLVEPSQLMPHEADTSCPY

SEQ ID NO: 31635 - protein, 22 aa, Homo sapiens
MCPGTPGTFQWISLRKGCWRSL

SEQ ID NO: 31636 - protein, 30 aa, Homo sapiens
MLAVPVTCGDTARSALQWEVSDDPEVRTHL

SEQ ID NO: 31637 - protein, 98 aa, Homo sapiens
MENGQWKTSVQVPRNQAEEEGESEADFRVLSLAHWGDEVASNNMEIARSRFKGMYYLHPGTLDYRDASGLSGWIFWQVLDFQKMILQSYTRTKSVGNN

SEQ ID NO: 31638 - protein, 114 aa, Homo sapiens [sequence omitted]

SEQ ID NO: 31639 - protein, 17 aa, Homo sapiens
MAILTLRHCSAWRAVLC

SEQ ID NO: 31640 - protein, 69 aa, Homo sapiens
MLLGPGPVAGPRDVGTCRGRQMEIQKHKDNKKLPQGIIIVFRLQTHTTPQIYTQLKGKLRKFFKEPYSE

SEQ ID NO: 31641 - protein, 36 aa, Homo sapiens
MFSPQELTGEGMGQDPSLCKASVTVMFQEQLVAIYH

SEQ ID NO: 31642 - protein, 50 aa, Homo sapiens
MTSSVHLLVFKDHLLSMLSCCQGACCPSTPHEGTRSTVSWIPPTYKAATH

SEQ ID NO: 31643 - protein, 27 aa, Homo sapiens
MDRRGGGRGGGGGGGRPGGLEPNRQYL

SEQ ID NO: 31644 - protein, 108 aa, Homo sapiens
MRGEERRGAASRLGDVPARVGGMRSLGPPGARSLPASRAHPWGREGGRLRTPARDLRESGAQRTGSGCSLALDGKWGIGWGAADPLTWITWCVSAGLRRPTTSSPSVD

SEQ ID NO: 31645 - protein, 36 aa, Homo sapiens
MATPVGVEHGEQSQAFSDDGWLGGLKVLDEKMLSKR

SEQ ID NO: 31646 - protein, 33 aa, Homo sapiens
MMIKGGGCGLENSHVKTHHLKVLSVRIFMMKFL

SEQ ID NO: 31647 - protein, 56 aa, Homo sapiens
MMVQSASVSKAGKGSSSSHGVAAALNQDLDPDPKCHVFNVSSQRCQMGSAQPCLCC

SEQ ID NO: 31648 - protein, 74 aa, Homo sapiens
MRNIPRRLAENMQQPLFSSCPSLMRAFEVTSAGHPGMSSMVTKCSGQTVWGKAPVLLSLPSCGCSMVPGSPTLT

SEQ ID NO: 31649 - protein, 29 aa, Homo sapiens
MPYLRINISRNVQCRFLFKILGYFMELGS

SEQ ID NO: 31650 - protein, 58 aa, Homo sapiens
MCGQCTRSARPPSWEPQEPAWCGRHTEPNPCLSAAAWEGSAGLTRGRSTRGGVPRGNN

SEQ ID NO: 31651 - protein, 20 aa, Homo sapiens
MVLLLVTFLSMDDLLGTQNS

SEQ ID NO: 31652 - protein, 20 aa, Homo sapiens
MSSLGSHQNKETGKQRNTRD

SEQ ID NO: 31653 - protein, 130 aa, Homo sapiens
MRPGSSPRAPECGAPALPRPQLDRLPARPAPSRGRGAPSLRWPAKEVGPRPQIPATCEPGKVCGASAGRRDAARPSRPRSSRVTFSTRRQPGPQRGRWGLRGGPESVRGLPHLGLRISGTPLGIFSSWSL

SEQ ID NO: 31654 - protein, 50 aa, Homo sapiens
MVLVFVDVHQCQGIEKLECDFEERRKDVKSDWSATFMVLRKEFAFLEHSL

SEQ ID NO: 31655 - protein, 68 aa, Homo sapiens
MAGAPPPASLPPCSLISDCCASNQRDSVGVGPSEPECDFEERRKDVKSDWSATFMVLRKEFAFLEHSL

SEQ ID NO: 31656 - protein, 1158 aa, Homo sapiens
VENSYLAGLTPTEFFFHAMGGREGLIDTAVKTAETGYIQRRLIKSMESVMVKYDATVRNSINQVVQLRYGEDGLAGESVEFQNLATLKPSNKAFEKKFRFDYTNERALRRTLQEDLVKDVLSNAHIQNELEREFERMREDREVLRVIFPTGDSKVVLPCNLLRMIWNAQKIFHINPRLPSDLHPIKVVEGVKELSKKLVIVNGDDPLSRQAQENATLLFNIHLRSTLCSRRMAEEFRLSGEAFDWLLGEIESKFNQAIAHPGEMVGALAAQSLGEPATQMTLNTFHYAGVSAKNVTLGVPRLKELINISKKPKTPSLTVFLLGQSARDAERAKDILCRLEHTTLRKVTANTAIYYDPNPQSTVVAEDQEWVNVYYEMPDFDVARISPWLLRVELDRKHMTDRKLTMEQIAEKINAGFGDDLNCIFNDDNAEKLVLRIRIMNSDENKMQEEEEVVDKMDDDVFLRCIESNMLTDMTLQGIEQISKVYMHLPQTDNKKKIIITEDGEFKALQEWILETDGVSLMRVLSEKDVDPVRTTSNDIVEIFTVLGIEAVRKALERELYHVISFDGSYVNYRHLALLCDTMTCRGHLMAITRHGVNRQDTGPLMKCSFEETVDVLMEAAAHGESDPMKGVSENIMLGQLAPAGTGCFDLLLDAEKCKYGMEIPTNIPGLGAAGPTGMFFGSAPSPMGGISPAMTPWNQGATPAYGAWSPSVGSGMTPGAAGFSPSAASDASGFSPGYSPAWSPTPGSPGSPGPSSPYIPSPGGAMSPSYSPTSPAYEPRSPGGYTPQSPSYSPTSPSYSPTSPSYSPTSPNYSPTSPSYSPTSPSYSPTSPSYSPTSPSYSPTSPSYSPTSPSYSPTSPSYSPTSPSYSPTSPSYSPTSPSYSPTSPSYSPTSPSYSPTSPSYSPTSPSYSPTSPSYSPTSPNYSPTSPNYTPTSPSYSPTSPSYSPTSPNYTPTSPNYSPTSPSYSPTSPSYSPTSPSYSPSSPRYTPQSPTYTPSSPSYSPSSPSYSPTSPTSTPQPVLLTVPAPQSIPQPLPSTHLPVPNIHPPLPSTRLPVPPIHPPPQNTPQHLLLIPQPLQSTPQPLPSTHLLAPLTRPLPPSTRPPAPPTRPPPPKAQPTLPLPLVTRPPAPPTVSQARLSARMTVTRRTEGTWGAAAG

SEQ ID NO: 31657 - protein, 43 aa, Homo sapiens [sequence omitted]

SEQ ID NO: 31658 - protein, 30 aa, Homo sapiens
MGGKSWLFFYSLVFCALLPLPRREDPFKLF

SEQ ID NO: 31659 - protein, 1973 aa, Homo sapiens
MTDDYVRVTQLYCDGVGKQYKDYVQSERNLEFDICSIWCSKPISVLQDYCDAIKINIFWPLLFQHQNSSVISRLHPCVDANNSRASEINLKRLQHLELMEDIVDLAKKAANDSLLIGGLLRIGYKIENKILAMEEALNWIKYAGDVTILTKLGSIDNCWPMLSIFFTEYKYHITKIVMEDCNLLEELKTQSCMDCIEQGELMKMKGNEEFSKERFDIAIIYYTRAIEYRPENHLLYGNRALCFLRTGQFRNALGDGKRATILKNTWPKGHYRYCDALSMLGEYNWALQANITAQKLCKNDPEGIKDLIQQHVKLQKQIEDLQGRTANKNPIKAFYENRAYTPRSLSAPVFSTSLNFVEKERDFRKINHEMANGGNQNLKVMDEALMVDDCDCHPEFSPPSSQPPKHKGKQKSRNNESEKFSSSSQLTLPADLKNILEKQFSKSSRGAHQDFANIMTMLRSLIQDGYTALLEQRCRSAAHAFTELLNGLDPQKIKQLNLAMINYVLVVYGLAISLLGIGQPEELSEAENQFKRIIEHYHNEGLDCLAYCGIGKVYLKKNRFLEALNHFEKARTLIYRLPGVLTWPTSNVIIEESQPEKIKMLLEKFVEECKFPPVPDAICCYQKCCGYSKIQIYITDPDFKGFIRISCCQYCKIEFHMNCWKKLKTTTFNDKIDKDFLQGICLTPDCEGVISKIIIFSSGGQVKCEFEHKVIKEKVPPRPILKQKCSSLEKLRLKEDKKLKRKIQKKEAKKLAQERMEEDLRESNPPKNEEQKETVDNVQHCQFLDDRILQCIKQYADKIKSGIWNTATLLKELLSWKVLSTEDYTTCFSSRNFLNEAVDYVIRHLIQEKNRVKTRIFLHVLSELKEVEPKLAAWIRKLNSFGLDATGPFFSRYEASLKQLDFSIMTFLWNEKYGHKLDSIEGKQLDYFFEPTSSKEARCLIWLLEEHRDKFPALHSALDEFFDIMDSRCTVLRKQDSGEAPFSSTKVKNKGKKKKPKDSKPMLVGSGTTSVTPNNEIITSSEDHSNQNSDTAGPFAVPDHLRQDVEEFEALYDQHSNEYVVRNKKLWDMNPKQKCSTLYDYFSQLLEEHGPLDMSHKMFSEEYEFFPEETRPILEKAGGLKSFLLGCPRFVVIDNCIALKKVASRLKKKRKKKNIKTKVEDISKAGEYLQVKLPLNSAAREFKPDVKSKPVSGSSSAPASEDVKPKPLSANSPKPACEDVKAKPVSDNSSRQVSEDGKPKGFSSNSPKPGSEDANYKRVSSNSPKPVLEDVKPTYWAQSHLVTGYCTYLPFQRFDNTRTSPAYINVLPGLPQYTSIYTPLVSLSPEYQLPRSVPVVPSFVANDRADKNATAYFEGHHLNAENAAGHQIASETQILEDSSLISVKSQCSTGDAHTVLSESNRKDGHCGNSNNKCEVIPESTSAVTNIPQVQMVAIQVSWNITHQEVNTEPYNPFEKQQGEISRIEKEYQVLQDQLKEAYENYEQIKLKGLEETRDLEEKLKRHLEENKISKTELDWLLQDLEREIKKWQEEKKEIQKTLKSLKKKIKKVSNANEMYTQKNDGNDKEHELHLDQSLEISNTLTNEKMKIEECIKKGKKDYEESHQRAVAAEVSVLENWKESEVYKLQIMQSQAEAYLKKLELISHDPAAYPDMESDICSWELFLSNVTKETEKAKYQFEEQIKAIKNGSRLSELSKVQISELSFPACNTVHPELLPESSGHDDQGFMTSASDVTGNQAALHRDPSVFSAGDSPGEAPSALLPGPPPSQPEATQLPGPKGAGQAALSEQSPAADQKQPVPPGCAACSSQSPKKPFNSIIEHLSVVFPCYNSTELAGFIKKVRSKNKNSLSGLSIDEIVQRVTEHILDEQKKKKPNPGKDKRTYEPSSAAHVTRSSQGPPLAVVAPSPKTKGQKAEDVPVRVALGASSCEICHEVFKSKNVRVLKCGHKYHKGCFKQWLKGQSACPACQTCDLLSEE

SEQ ID NO: 31660 - protein, 11 aa, Homo sapiens
LSQQLLCKMPR

SEQ ID NO: 31661 - protein, 113 aa, Homo sapiens
MEKSAGPYDKGEYLTSVQKTLCDIQVLSLSRVPAIEDMEISLPNIHYFNIDMSKMGLINKEEVRGPHRKAVIGLRVRQEMGGVQSSKPYKMLEAIHKQAPAWKITWDKNNEII

SEQ ID NO: 31662 - protein, 227 aa, Homo sapiens
MCTATESFAADPILYRPVALALDTKGPEIRTGLIKGSSTMEVGLKMGATLKIMLDNTYMKKCDENILWLDYKNICKVMEVGSKIYVDDGLISLQVKQKGADFLVTEVETGGSSGSKKGVNLPGAAVDLPAVSEDIQDLNFGVEQDVDMVFASFIRKASDVHEVREALGEKGKNIKTINTIENHVGVQRFDEILEASDGIMVARGNPGIEIPAEKVFLAQRMMIGRCS

SEQ ID NO: 31663 - protein, 75 aa, Homo sapiens
MTFVAGSSLAPPLPVWNLKFHRLGRKRSSRDSGFAEHPCFPVFPFSPNKTLLHSPFKPSASLNFCGCGTDKDAFS

SEQ ID NO: 31664 - protein, 110 aa, Homo sapiens
MLPCASCLPGSLLLWALLLLLLGSASPQDSEEPDSYTECTDGYEWDPDSQHCRGVCAWGTKHPQEPGKGLIAAFQGTAPPPRTAVGAQQPVLCPALLHRGQLWLSGGQLS

SEQ ID NO: 31665 - protein, 195 aa, Homo sapiens
MMPPPGIPPPFPPMGLPPMSQRPPAIPPMPPGILPPMLPPMGAPPPLTQIPGMVPPMMPGMLMPAVPVTAAVSTRGQQVAGSALQSRESDLECRTMTSILSLFSSHPPRSPAALPTLKSFSPAMYSALLVSHSSPKAYTFSCYSRALSSSLKEHTYPHRATHCGHMNIVLHILFVPRRVSSTWGSCCAFLCYRSV

SEQ ID NO: 31666 - protein, 42 aa, Homo sapiens
MPYCYLAGSTTGQKNENCRYLFCVFLSRMVDVRDPTKDLWTH

SEQ ID NO: 31667 - protein, 525 aa, Homo sapiens
MPGPCSEGFVQGRDVGELQEPGLPGELPPKENNSTGKVFQAVMLERHEIHDIQDFYFREMQQNIHDFECQCHNDERNYREIPAIKIKNITGRRDQGDGRNAGNKPVENQLELSFWLHLAELQGFQIERKIYECNQIEKSVTRGSSVSLLQTNLPCVNTSISNIYRNDFMHPSLLTQDQKAYIREKPYKCSDCGKAFNQRSNLTTHQRIHTGQKPHKCDICGKGFRRIANLASHHRIHTGEKPYRCNECGKTFNQTFNLTTHQRIHTGQKPYKCDRCGKGFRQIGNLASHHRIHTGEKPYRCNECGKTFNRMFHLTRHQRIHTGQKPYKCDICGKGFRQIANLASHHRIHTGEKPYKCSDCGKTFNYRSHLTRHQRIHTGQKPYKCDTCGKDFSQNSYLENHQRIHTREKSYRCNECGKTFNKMTNLTTHQRIHTGQKTYKCDICGKGFRQIGNLASHHRIHTGEKPYRCNECGKTFNRMFHLTRHQRIHTGQKPYKCDICGKSFSQNSYLENHQRIHTGEKTYKL

SEQ ID NO: 31668 - protein, 123 aa, Homo sapiens
MGQRGAVGPPAALGVEGGAAPAPLTLACPSSRYFLDSTSETSLMPKTWISWAEIRSHTSSLSMSHPSLCCRISPTFASRSLIPLRYPSKSTSKNVSTSSTAAALMGGTALCTALQASLAAPRL

SEQ ID NO: 31669 - protein, 161 aa, Homo sapiens [sequence omitted]

SEQ ID NO: 31670 - protein, 163 aa, Homo sapiens [sequence omitted]

SEQ ID NO: 31671 - protein, 76 aa, Homo sapiens
MVVWKYLKEWKPGSKEGAETLPTLLPAPQPGSCAPAGQAPSYSPQTPFPSRPRTHLPRSGSGPGPPRAAEAGFGAP

SEQ ID NO: 31672 - protein, 19 aa, Homo sapiens
KNHRSDSAWPEGTLCWWLY

SEQ ID NO: 31673 - protein, 47 aa, Homo sapiens
RDSDLMEDRCFPHFSFSPKKVLLLSPFKQPVSLNFCGHGTDKDPVFS

SEQ ID NO: 31674 - protein, 34 aa, Homo sapiens
VRATARAPRWGMRPRRAGQGAPAAHPRGGGPERP

SEQ ID NO: 31675 - protein, 18 aa, Homo sapiens
KSLFDITFLCFPSAWKTY

SEQ ID NO: 31676 - protein, 8 aa, Homo sapiens
VARIAEFS

SEQ ID NO: 31677 - protein, 55 aa, Homo sapiens
RPPQEDPFSPRNYSMLKPLKVVLETLKAPWTGFMISKSLLWSQGNLDLRNAEGGL

SEQ ID NO: 31678 - protein, 8 aa, Homo sapiens
LNTLQLHS

SEQ ID NO: 31679 - protein, 5 aa, Homo sapiens
MQGGC

SEQ ID NO: 31680 - protein, 29 aa, Homo sapiens
KSLLSQQLLCKMPRPGIVAEHPRPAEVPP

SEQ ID NO: 31681 - protein, 291 aa, Homo sapiens
ILIKSSPKLSVYPDPHLHSSQERERGKGGRKKKKPNNLAETSQRMLQNSAVLLVLVISASATHEAEQNDSVSPRKSRVAAQNSAEVVRCLNSALQVGCGAFACLENSTCDTDGMYDICKSFLYSAAKFDTQGKAFVKESLKCIANGVTSKVFLAIRRCSTFQRMIAEVQEECYSKLNVCSIAKRNPEAITEVVQLPNHFSNRYYNRLVRSLLECDEDTVSTIRDSLMEKIGPNMASLFHILQTDHCAQTHPRADFNRRRTNEPQKLKVLLRNLRGEEDSPSHIKRTSHESA

SEQ ID NO: 31682 - protein, 11 aa, Homo sapiens
LQPRSRWRCAA

SEQ ID NO: 31683 - protein, 19 aa, Homo sapiens
LNFSWIEREARSSACQQPP

SEQ ID NO: 31684 - protein, 55 aa, Homo sapiens
KLGKETRSRGTTVGQAAWKISAGSPRQNSHAPGQAVPTAWWRGNLTSGRAPLLHS

SEQ ID NO: 31685 - protein, 12 aa, Homo sapiens
IIYPGEFSCLPG

SEQ ID NO: 31686 - protein, 23 aa, Homo sapiens
LEKVCRCLHFPGSMQADECHSCN

SEQ ID NO: 31687 - protein, 54 aa, Homo sapiens
VEGRGAQARTNPHVPGRDPDPAAYREAKPAGWAAEPESGTVWSPLELRSGCSAS

SEQ ID NO: 31688 - protein, 105 aa, Homo sapiens
LPGSCGTALQPGRRRRGTGASRPPGSAPSSSRGRRQLGRLPGLRLGARRTLACVLDVPGVRSAPSATCWEDWPSAPPSGASGLHPRGLPGRPGRSHADQVRGRGG

SEQ ID NO: 31689 - protein, 13 aa, Homo sapiens
MSWVRQAPGKGLD

SEQ ID NO: 31690 - protein, 35 aa, Homo sapiens
RSESLPIVQSSRKKRSQSPTLSALMEVSSFGKSFI

SEQ ID NO: 31691 - protein, 84 aa, Homo sapiens
LLQSGSQSLSTIFYPRAAWIVVPSVRTPLLGPTTAASDISVSLFLWRFGLPISVVATLGVYGPLKNGRVREPQGAVRIQSRRGW

SEQ ID NO: 31692 - protein, 1903 aa, Homo sapiens
MTECPGHFGHIELAKPVFHVGFLVKTMKVLRCVCFFCSKLLVDSNNPKIKDILAKSKGQPKKRLTHVYDLCKGKNICEGGEEMDNKFGVEQPEGDEDLTKEKGHGGCGRYQPRIRRSGLELYAEWKHVNEDSQEKKILLSPERVHEIFKRISDEECFVLGMEPRYARPEWMIVTVLPVPPLSVRPAVVMQGSARNQDDLTHKLADIVKINNQLRRNEQNGAAAHVIAEDVKLLQFHVATMVDNELPGLPRAMQKSGRPLKSLKQRLKGKEGRVRGNLMGKRVDFSARTVITPDPNLSIDQVGVPRSIAANMTFAEIVTPFNIDRLQELVRRGNSQYPGAKYIIRDNGDRIDLRFHPKPSDLHLQTGYKVERHMCDGDIVIFNRQPTLHKMSMMGHRVRILPWSTFRLNLSVTTPYNADFDGDEMNLHLPQSLETRAEIQELAMVPRMIVTPQSNRPVMGIVQDTLTAVRKFTKRDVFLERGEVMNLLMFLSTWDGKVPQPAILKPRPLWTGKQIFSLIIPGHINCIRTHSTHPDDEDSGPYKHISPGDTKVVVENGELIMGILCKKSLGTSAGSLVHISYLEMGHDITRLFYSNIQTVINNWLLIEGHTIGIGDSIADSKTYQDIQNTIKKAKQDVIEVIEKAHNNELEPTPGNTLRQTFENQVNRILNDARDKTGSSAQKSLSEYNNFKSMVVSGAKGSKINISQVIAVVGQQNVEGKRIPFGFKHRTLPHFIKDDYGPESRGFVENSYLAGLTPTEFFFHAMGGREGLIDTAVKTAETGYIQRRLIKSMESVMVKYDATVRNSINQVVQLRYGEDGLAGESVEFQNLATLKPSNKAFEKKFRFDYTNERALRRTLQEDLVKDVLSNAHIQNELEREFERMREDREVLRVIFPTGDSKVVLPCNLLRMIWNAQKIFHINPRLPSDLHPIKVVEGVKELSKKLVIVNGDDPLSRQAQENATLLFNIHLRSTLCSRRMAEEFRLSGEAFDWLLGEIESKFNQAIAHPGEMVGALAAQSLGEPATQMTLNTFHYAGVSAKNVTLGVPRLKELINISKKPKTPSLTVFLLGQSARDAERAKDILCRLEHTTLRKVTANTAIYYDPNPQSTVVAEDQEWVNVYYEMPDFDVARISPWLLRVELDRKHMTDRKLTMEQIAEKINAGFGDDLNCIFNDDNAEKLVLRIRIMNSDENKMQEEEEVVDKMDDDVFLRCIESNMLTDMTLQGIEQISKVYMHLPQTDNKKKIIITEDGEFKALQEWILETDGVSLMRVLSEKDVDPVRTTSNDIVEIFTVLGIEAVRKALERELYHVISFDGSYVNYRHLALLCDTMTCRGHLMAITRHGVNRQDTGPLMKCSFEETVDVLMEAAAHGESDPMKGVSENIMLGQLAPAGTGCFDLLLDAEKCKYGMEIPTNIPGLGAAGPTGMFFGSAPSPMGGISPAMTPWNQGATPAYGAWSPSVGSGMTPGAAGFSPSAASDASGFSPGYSPAWSPTPGSPGSPGPSSPYIPSPGGAMSPSYSPTSPAYEPRSPGGYTPQSPSYSPTSPSYSPTSPSYSPTSPNYSPTSPSYSPTSPSYSPTSPSYSPTSPSYSPTSPSYSPTSPSYSPTSPSYSPTSPSYSPTSPSYSPTSPSYSPTSPSYSPTSPSYSPTSPSYSPTSPSYSPTSPSYSPTSPNYSPTSPNYTPTSPSYSPTSPSYSPTSPNYTPTSPNYSPTSPSYSPTSPSYSPTSPSYSPSSPRYTPQSPTYTPSSPSYSPSSPSYSPTSPTSTPQPVLLTVPAPQSIPQPLPSTHLPVPNIHPPLPSTRLPVPPIHPPPQNTPQHLLLIPQPLQSTPQPLPSTHLLAPLTRPLPPSTRPPAPPTRPPPPKAQPTLPLPLVTRPPAPPTVSQARLSARMTVTRRTEGTWGAAAG

SEQ ID NO: 31693 - protein, 307 aa, Homo sapiens
MNNPERWFESTGCGKTYNQNRAFNQHQRFHSGEKTYEHNECGKAFSWPSILSKHQRIHTGKKLYTCEDCGKSFSVHSYFIQHCKIHTREKPYECIKCGKAFSTHSSYVQHLKIHTGEKHHECNQCGKAFSHSSNLIHHQRIHSGEKPYKCKECGKAFNRQSNLIQHQRIHSGEKPYDCKECGKAFSTQLFLIQHQRIHTGEKPYECNECAKSFSLNRTLTVHQRIHTGEKPYRCNECGKSFSQCSQVIQHKRIHTGEKPYICNECGKSFGARLSLIQHQRIHTGEKPYGCSVCGKTFSQKGHLIQHQ

SEQ ID NO: 31694 - protein, 291 aa, Homo sapiens
IWHHTFYNELRVAPEEHPILLTEAPLNPKANREKMTQIMFETFNTPAMYVAIQAVLSLYTSGRTTGIVMDSGDGFTHTVPIYEGNALPHATLRLDLAGRELTDYLMKILTERGYRFTTTAEQEIVRDIKEKLCYVALDSEQEMAMAASSSSVEKSYELPDGQVITIGNERFRCPEALFQPCFLGMESCGIHKTTFNSIVKSDVDIRKDLYTNTVLSGGTTMYPGIAHRMQKEITALAPSIMKIKIIAPPKRKYSVWVGGSILASLSTFQQMWISKQEYDESGPSIVHRKCF

SEQ ID NO: 31695 - protein, 270 aa, Homo sapiens
LWKFETSKYYMTIIDVAGHRDFIKNMITGTSQADCTVLIVAAGVGEFEAVISQNGQTREHALLAYTLGVKQLIVGINKMDSTEPPYSQKRYEEIIKEVSTYIKKIGYNPDTVEFVPISSWNGDNMLEPSANMPWFKGWKVTGKDGNASGTTLFEVLDCILPPTRPTDKPLHLPLQGVYKIGGIGAVSVGRVETGILKPGTVVTFAPVTVRTEVKSVEMHHEALSEVFPGDTVGFSVKNVSLKDVHQGNIAGDSKNDSPMEAAGFIAQVII

SEQ ID NO: 31696 - protein, 167 aa, Homo sapiens
ICDICCRNLNIERPTYTNLNHLISQIVSSITASLRFDGALNVDLTEFQTNLVPYSHIHFPLATYAPVISAEKAYHEQLSVAEITNASFEPANQMVKCDPRHGKYMACCLLCHGDVVPKDANAAIATIKTKRSIQFVDWCPTGFKVGINYQSPTVVPGGDLAMVQSAC

SEQ ID NO: 31697 - protein, 201 aa, Homo sapiens
IKLLLLQGYTFNHSADFETVRMIKEKLCYVGYNIVQEQKLALETTVLVESYTLPDGGIIKVGGERFETPEALFQPHLINVEGVGVAELLFNTIQAADIDTRSEFYKHIVLSGGSTMYPGLSSRLKRELKQLYLERVLKDDAEKLPKFKICIEDPSRRKHMVFLGGAVLADIMKDKDNFWMTRQEYQEKGVLVLEKLGVTVR

SEQ ID NO: 31698 - protein, 246 aa, Homo sapiens
MPSYVAFTPEGECLIGDAAKNQLTSNPKNTVFDAKRLIGRRWHDPSVQQDIEFLPFKVVEKNTKSYIQIDVGGGQTKTFAPKEISAMVLTKMKENAEAYLGKVTHAVVTAPAYFNDAQCQATKDAGTIADLNVMRIINKPTAAAIAYGLDKREGEKNILVFDLGGGTFDVSLLTIDNGVFKVVATNGDTYLGGEDFDQRVMEHFIKLYKKKTGKDVRKDNRAVQKLWRKVEKAKRALSSQHQASSN

SEQ ID NO: 31699 - protein, 92 aa, Homo sapiens
MDRWGQNGLFPRRRHLFAPFLNLISSVFLHRFCTLGTKKPSGTLLRKDCRREDQRGSWNLFQRKLTNSEHLQLKLPLDVISVACIIPLIEQS

SEQ ID NO: 31700 - protein, 19 aa, Homo sapiens
MLSVNSPGACQAMFELVPG

SEQ ID NO: 31701 - protein, 66 aa, Homo sapiens
MKKLSSYITNLCCAPTKPALNFRANYNPHSVSGKEDSSTLDSGLERSQGLDSTGGGEDICRVCTAS

SEQ ID NO: 31702 - protein, 52 aa, Homo sapiens
MGVSLCCPGWSAVVQSWLTATSASRVQAILLPEPPEYLELQSQILTLSPRLA

SEQ ID NO: 31703 - skipped

SEQ ID NO: 31704 - protein, 184 aa, Homo sapiens
MLLSSASIQRESEIQPPLLEAPTSKLCDSFLGTLLCGSGDDNVTALPSKPKFPHTDELLGSSICRRSPTFCYYYVLQMSRREWGGREQEEERKNNVLKLFSKDNGLQLRQCSCKGHDADFEDASFHIYSLKETNSANQLRELSLSCLKMRSQSAQHHDLGLVTPELRWKRMVLLRPFKIPSVIQ

SEQ ID NO: 31705 - protein, 171 aa, Homo sapiens
MPQLLRQAEAGEEGRPPRAPLQGVHPALISDGGVFAEGGASPQQLGAASWQERVSLSHGAAGRLLYYPATRLPLRLLVVEQLRLGRRHYHIALRGSRHLTAGTRELGGRPAVKSTSGWSIEQLRGAAPRRAPSGSSTRERLRLGPERPPAPGCPRWSPRRGGSPGAVPVEN

SEQ ID NO: 31706 - protein, 128 aa, Homo sapiens
MSWNSILGRRFAFEEDGEESGEAPRNRIDLDINPGRLPPPAELRGRAAPSPRSGPRVRRAPPSGQRERPAPPPRARGLDAAAATPTPIPRGQQVSRSPPSRQRRPRPSSSRAGGTPSELVLSRGRRAH

SEQ ID NO: 31707 - protein, 357 aa, Homo sapiens
MHPSLLTQDQKAYIREKPYKCSDCGKAFNQRSNLTTHQRIHTGQKPHKCDICGKGFRRIANLASHHRIHTGEKPYRCNECGKTFNQTFNLTTHQRIHTGQKPYKCDRCGKGFRQIGNLASHHRIHTGEKPYRCNECGKTFNRMFHLTRHQRIHTGQKPYKCDICGKGFRQIANLASHHRIHTGEKPYKCSDCGKTFNYRSHLTRHQRIHTGQKPYKCDTCGKDFSQNSYLENHQRIHTREKSYRCNECGKTFNKMTNLTTHQRIHTGQKTYKCDICGKGFRQIGNLASHHRIHTGEKPYRCNECGKTFNRMFHLTRHQRIHTGQKPYKCDICGKSFSQNSYLENHQRIHTGEKTYKL

SEQ ID NO: 31708 - protein, 225 aa, Homo sapiens
MGAGLGFGSVAPHSPKRPDVCRWLSPFILSCCVYFCLWIPEDQLSWFAALVKCLPVLCLAGFLWVMSPSGGYTQLLQGALVCSAVGDACLIWPAAFVPGMAAFATAHLLYVWAFGFSPLQPGLLLLIILAPGPYLSLVLQHLEPDMVLPVAAYGLILMAMLWRGLAQGGSAGWGALLFTLSDGVLAWDTFAQPLPHAHLVIMTTYYAAQLLITLSALRSPVPKTD

SEQ ID NO: 31709 - protein, 80 aa, Homo sapiens [sequence omitted]

SEQ ID NO: 31710 - protein, 6 aa, Homo sapiens
MSFSPG

SEQ ID NO: 31711 - protein, 48 aa, Homo sapiens
MRGVSHDCRPMCVRGVLWESMDPEVPGLSADLCPVCPVAPGDVSSRRG

SEQ ID NO: 31712 - protein, 30 aa, Homo sapiens
MTRAPQRQQPQGAAMAPDLSHGCRKLNGGG

SEQ ID NO: 31713 - protein, 37 aa, Homo sapiens
MQVFNRCFTIKIFSPQVSNIEESLTRDTSPYEDLGRF

SEQ ID NO: 31714 - protein, 70 aa, Homo sapiens
MQVFNRCFTIKIFSPQVSNIEESLTRRHRSFMGMYNRNQSSPPPGDLHFRSLRLPVTPERQTADWPRWGN

SEQ ID NO: 31715 - protein, 132 aa, Homo sapiens
MYNRNQSSPPPGDLHFRSLRLPVTPERQTADWPSCLKTQPDSDACQPASPTRAAALPTRMGGTTPPRCPRAERSRGSTGIARASALAAGGAGVLRGRDQSAIRAATPDLGRQLSSHCDGHWGAPSILVKFSL

SEQ ID NO: 31716 - protein, 114 aa, Homo sapiens
MRLKSSFLRGLGSWKSNPLRLGGWTILLTLTMGQGEPGGPQGDPWVPHELLLPSLCDSSHASSWGSGSITCAWRGGDSSSHPLVSGHILSNSPVAAVMCSSMGTHLSPFKGTLL

SEQ ID NO: 31717 - protein, 222 aa, Homo sapiens
MEHKEVVLLLLLFLKSAPTETGPSVQECYHSNGQSYRGTYFTTVTGRTCQAWSSMTPHQHSRTPEKYPNDGLISNYCRNPDCSAGPWCYTTDPNVRWEYCNLTRCSDDEGTVFVPLTVIPVPSLEDSFIQAPTEPRPSVQECYHGNGQSYRGTYFTTVTGRTCQAWSSMTPHQHSRTPEQYPNWLDLQLLQESGLFGRPLVLYNGSQSQVGVLQPDRMLRQE

SEQ ID NO: 31718 - protein, 133 aa, Homo sapiens
MFQVELVEAPTETGPSVQECYHSNGQSYRGTYFTTVTGRTCQAWSSMTPHQHSRTPEKYPNDGLISNYCRNPDCSAGPWCYTTDPNVRWEYCNLTRCSDDEGTVFVPLTVIPVPSLEDSFIQGKKSVARHLHA

SEQ ID NO: 31719 - protein, 92 aa, Homo sapiens
MLVLVLFGYGVLSPRSLMPGSLERGFCMAVREPDHLQRVSLPRMVYPQPKVLTPCRKDVLVVPLGWLPLSGRAHSTSTSSTSSSGSRTPPLG

SEQ ID NO: 31720 - protein, 409 aa, Homo sapiens
MAKDAGLIEANGELKVFIDQNLSSGKGVVSLVAVHPSTVNPLGKQLLPKTFGQSNVSIAQQVVIGMPQRPAASNTLVVGSSHTPSTHFASQNQPSDSSPRSAGKRNRKGENCKGLRHFSMKVCEKVQRKGTTSYNEVADELVAEFSAADNHILPNESAYDQKNIRRRVYDALNVLMAMNIISKEKKEIKWIGLPTNSAQECQNLEVERQRRLERIKQKQSQLRELILQQIAFKNLVQRNRHAEQQASRPPPPNSVIHLPFIVVNTSKKTVIDCSISNDKLEYLFNFDNTFEIQGDIEVLKRMGMACWLESGSCSAEDLKMARSLVPKALEPYVTEMAQGTVGGVFITAAGSTSKGTRFSASDLTNGADGMLATSSKRSQYSGSRVETPVSYVGEDDEEDDDFNENDKDD

SEQ ID NO: 31721 - skipped

SEQ ID NO: 31722 - protein, 26 aa, Homo sapiens
MVNTEILLNDGGGFQQDGWGAGKRME

SEQ ID NO: 31723 - protein, 4 aa, Homo sapiens
MQEL

SEQ ID NO: 31724 - protein, 9 aa, Homo sapiens
LSPFKGTLL

SEQ ID NO: 31725 - protein, 34 aa, Homo sapiens
LGYTQVIRYNYYYLMSFFKLRSSTFDCHPWKSSY

SEQ ID NO: 31726 - protein, 93 aa, Homo sapiens
MGSVEGLAEQEDSSFQRDFLWEACSSGHCEPSLLSEGNCPSWLPLLPPLNAQAARPKSPTRDADGFGVKGWLLLPPALESQVQRRAKTPELEA

SEQ ID NO: 31727 - protein, 50 aa, Homo sapiens
RALPALRGFQPGSFGKPGRLLTGDDTCVGCWHSCYLTREGGDFACDGLPV

SEQ ID NO: 31728 - protein, 23 aa, Homo sapiens
VENWKTEVREGEEKNREDREIRR

SEQ ID NO: 31729 - protein, 59 aa, Homo sapiens
IEDLRDKILGVTIENSRIVLQIDTRRLAADHFRTKSEMEQSLRRSLEADIKACAGRPMS

SEQ ID NO: 31730 - protein, 23 aa, Homo sapiens
LSSAMGALEARPGRSRPWGAHRP

SEQ ID NO: 31731 - protein, 47 aa, Homo sapiens
VLVCLVRELRGPGIVFKVVLLPTCPVVPAPVLTATLPFFHPRVGSTK

SEQ ID NO: 31732 - protein, 1966 aa, Homo sapiens
LRTIKRVQFGVLSPDELKRMSVTEGGIKYPETTEGGRPKLGGLMDPRQGVIERTGRCQTCAGNMTECPGHFGHIELAKPVFHVGFLVKTMKVLRCVCFFCSKLLVDSNNPKIKDILAKSKGQPKKRLTHVYDLCKGKNICEGGEEMDNKFGVEQPEGDEDLTKEKGHGGCGRYQPRIRRSGLELYAEWKHVNEDSQEKKILLSPERVHEIFKRISDEECFVLGMEPRYARPEWMIVTVLPVPPLSVRPAVVMQGSARNQDDLTHKLADIVKINNQLRRNEQNGAAAHVIAEDVKLLQFHVATMVDNELPGLPRAMQKSGRPLKSLKQRLKGKEGRVRGNLMGKRVDFSARTVITPDPNLSIDQVGVPRSIAANMTFAEIVTPFNIDRLQELVRRGNSQYPGAKYIIRDNGDRIDLRFHPKPSDLHLQTGYKVERHMCDGDIVIFNRQPTLHKMSMMGHRVRILPWSTFRLNLSVTTPYNADFDGDEMNLHLPQSLETRAEIQELAMVPRMIVTPQSNRPVMGIVQDTLTAVRKFTKRDVFLERGEVMNLLMFLSTWDGKVPQPAILKPRPLWTGKQIFSLIIPGHINCIRTHSTHPDDEDSGPYKHISPGDTKVVVENGELIMGILCKKSLGTSAGSLVHISYLEMGHDITRLFYSNIQTVINNWLLIEGHTIGIGDSIADSKTYQDIQNTIKKAKQDVIEVIEKAHNNELEPTPGNTLRQTFENQVNRILNDARDKTGSSAQKSLSEYNNFKSMVVSGAKGSKINISQVIAVVGQQNVEGKRIPFGFKHRTLPHFIKDDYGPESRGFVENSYLAGLTPTEFFFHAMGGREGLIDTAVKTAETGYIQRRLIKSMESVMVKYDATVRNSINQVVQLRYGEDGLAGESVEFQNLATLKPSNKAFEKKFRFDYTNERALRRTLQEDLVKDVLSNAHIQNELEREFERMREDREVLRVIFPTGDSKVVLPCNLLRMIWNAQKIFHINPRLPSDLHPIKVVEGVKELSKKLVIVNGDDPLSRQAQENATLLFNIHLRSTLCSRRMAEEFRLSGEAFDWLLGEIESKFNQAIAHPGEMVGALAAQSLGEPATQMTLNTFHYAGVSAKNVTLGVPRLKELINISKKPKTPSLTVFLLGQSARDAERAKDILCRLEHTTLRKVTANTAIYYDPNPQSTVVAEDQEWVNVYYEMPDFDVARISPWLLRVELDRKHMTDRKLTMEQIAEKINAGFGDDLNCIFNDDNAEKLVLRIRIMNSDENKMQEEEEVVDKMDDDVFLRCIESNMLTDMTLQGIEQISKVYMHLPQTDNKKKIIITEDGEFKALQEWILETDGVSLMRVLSEKDVDPVRTTSNDIVEIFTVLGIEAVRKALERELYHVISFDGSYVNYRHLALLCDTMTCRGHLMAITRHGVNRQDTGPLMKCSFEETVDVLMEAAAHGESDPMKGVSENIMLGQLAPAGTGCFDLLLDAEKCKYGMEIPTNIPGLGAAGPTGMFFGSAPSPMGGISPAMTPWNQGATPAYGAWSPSVGSGMTPGAAGFSPSAASDASGFSPGYSPAWSPTPGSPGSPGPSSPYIPSPGGAMSPSYSPTSPAYEPRSPGGYTPQSPSYSPTSPSYSPTSPSYSPTSPNYSPTSPSYSPTSPSYSPTSPSYSPTSPSYSPTSPSYSPTSPSYSPTSPSYSPTSPSYSPTSPSYSPTSPSYSPTSPSYSPTSPSYSPTSPSYSPTSPSYSPTSPSYSPTSPNYSPTSPNYTPTSPSYSPTSPSYSPTSPNYTPTSPNYSPTSPSYSPTSPSYSPTSPSYSPSSPRYTPQSPTYTPSSPSYSPSSPSYSPTSPTSTPQPVLLTVPAPQSIPQPLPSTHLPVPNIHPPLPSTRLPVPPIHPPPQNTPQHLLLIPQPLQSTPQPLPSTHLLAPLTRPLPPSTRPPAPPTRPPPPKAQPTLPLPLVTRPPAPPTVSQARLSARMTVTRRTEGTWGAAAG

SEQ ID NO: 31733 - protein, 33 aa, Homo sapiens
MPRLGAVGLLPPRAGRSAARPPAGPPAAAGIPG

SEQ ID NO: 31734 - protein, 42 aa, Homo sapiens
VCFLLFFVLEESKGREMDFTSGLWLHQFTGNGIKMVQLRHDH

SEQ ID NO: 31735 - protein, 11 aa, Homo sapiens
MITKNIIIIPF

SEQ ID NO: 31736 - protein, 21 aa, Homo sapiens
INMGCVPLCQDSACGWSTVPA

SEQ ID NO: 31737 - protein, 60 aa, Homo sapiens
ILHVGGALFQPEKMVLRPLSKTFSSMSRFLCGNSDTCSGVLSFLRELKGYKAPENVLYAG

SEQ ID NO: 31738 - skipped

SEQ ID NO: 31739 - protein, 45 aa, Homo sapiens
VEHSTRFANQEAMVPVQMGAVCEYRAQEKGRRSVNIRNCKILLNQ

SEQ ID NO: 31740 - protein, 12 aa, Homo sapiens
VGLSLLSIQRWK

SEQ ID NO: 31741 - protein, 8 aa, Homo sapiens
MNPSLTGK

SEQ ID NO: 31742 - protein, 16 aa, Homo sapiens
MPHHLPTRAHRFTQIQ

SEQ ID NO: 31743 - protein, 12 aa, Homo sapiens
MAWLMGRELYYF

SEQ ID NO: 31744 - protein, 23 aa, Homo sapiens
ISPSLLRTVCFTSWAFAAWGFLM

SEQ ID NO: 31745 - protein, 4 aa, Homo sapiens
LVLF

SEQ ID NO: 31746 - protein, 16 aa, Homo sapiens
MAPDLSHGCRKLNGGG

SEQ ID NO: 31747 - protein, 158 aa, Homo sapiens
MLPRLVLNSWLQAVLPPWPPKVLGLQTWQGGLIDMDKKSTHRNPEDARAGKYEGKHKRKKRRKQNQNQHRSRHRSVTSFSSDDPMFPSSSSSSSGSQTDSSIEDAAKGKIKKKRREKTNKWEKRKSLVLLLRLECNDATSAHCNLCLPDSSNSPATAS

SEQ ID NO: 31748 - protein, 25 aa, Homo sapiens
MEPRDLSPTHLFACLLVRFSEKFLA

SEQ ID NO: 31749 - protein, 8 aa, Homo sapiens
MFLHWTLS

SEQ ID NO: 31750 - protein, 8 aa, Homo sapiens
MFKQFSDL

SEQ ID NO: 31751 - protein, 83 aa, Homo sapiens
MNPKQATNRQILKSCQVQRLIWWRNCTLKAAQVIILAYSQVCKILNELSWANKGILVFYLPAFKNFPSLKGKCYINHKLPWSR

SEQ ID NO: 31752 - protein, 16 aa, Homo sapiens
MCGLIKELTFIRSAVS

SEQ ID NO: 31753 - protein, 47 aa, Homo sapiens
MSLSSQSVKCVCDSAFLRTQVTWRLENSMEQGKQRRCAGVYVAFIIM

SEQ ID NO: 31754 - protein, 54 aa, Homo sapiens
METDRILAWGPSGRAGCWAGRLWRSPSPELTLFLAAMVAALTTFCLHLCTKKSK

SEQ ID NO: 31755 - protein, 23 aa, Homo sapiens
MPSTSSICPVSPRTPMAPVSEQS

SEQ ID NO: 31756 - protein, 533 aa, Homo sapiens
MAQWLAYSRLYQSLEFPSSCLLHPITSIEYQWIQGRLKAEQQEELAASFSSLLTYGLSLIRRFRSVFPLSVSDSPARLQSLLRVLVQMCKMKAFGELCPNTAPLPQLVTEALQTGTTEWFHLKQQHHQPMVQGIPEAGKALLGLVQDVIGDLHQCQRTWDKIFHNTLKIHLFSMAFRELQWLVAKRVQDHTTVVGDVVSPEMGESLFQLYISLKELCQLRMSSSERDGVLALDNFHRWFQPAIPSWLQKTYNEALARVQRAVQMDELVPLGELTKHSTSAVDLSTCFAQISHTARQLDWPDPEEAFMITVKFVEDTCRLALVYCSLIKARARELSSGQKDQGQAANMLCVVVNDMEQLRLVIGKLPAQLAWEALEQRVGAVLEQGQLQNTLHAQLQSALAGLGHEIRTGVRTLAEQLEVGIAKHIQKLVGVRESVLPEDAILPLMKFLEVELCYMNTNLVQENFSRSVAAPALGALATSPSPPTAPPSWAPASVLRGVAAPALGALATSPSPPTAPLSWASASVLRGGGESLW

SEQ ID NO: 31757 - protein, 349 aa, Homo sapiens
MPGTKRFQHVIETPEPGKWELSGYEAAVPITEKSNPLTQDLDKADAENIVRLLGQCDAEIFQEEGQALSTYQRLYSESILTTMVQVAGKVQEVLKEPDGGLVVLSGGGTSGRMAFLMSVSFNQLMKGLGQKPLYTYLIAGGDRSVVASREGTEDSALHGIEELKKVAAGKKRVIVIGISVGLSAPFVAGQMDCCMNNTAVFLPVLVGFNPVSMARNDPIEDWSSTFRQVAERMQKMQEKQKAFVLNPAIGPEGLSGSSRMKGGSATKILLETLLLAAHKTVDQGIAASQRCLLEILRTFERAHQVTYSQSPKIATLMKSVSTRCVDMCLEVRMWPGWRILRAGRLCETC

SEQ ID NO: 31758 - protein, 80 aa, Homo sapiens
MALETICRPSGRKSSKMQAFRIWDVNQKTFYLRNNQLVAGYLQGPNVNLEGEWLPGKPMYVGITSLCPSVCSSMACLHKP

SEQ ID NO: 31759 - protein, 98 aa, Homo sapiens
MEICRGLRSHLITLLLFLFHSETICRPSGRKSSKMQAFRIWDVNQKTFYLRNNQLVAGYLQGPNVNLEGEWLPGKPMYVGITSLCPSVCSSMACLHKP

SEQ ID NO: 31760 - protein, 294 aa, Homo sapiens
MEKIWHHTFYNELRVAPEEHPILLTEAPLNPKANREKMTQIMFETFNTPAMYVAIQAVLSLYTSGRTTGIVMDSGDGFTHTVPIYEGNALPHATLRLDLAGRELTDYLMKILTERGYRFTTTAEQEIVRDIKEKLCYVALDSEQEMAMAASSSSVEKSYELPDGQVITIGNERFRCPEALFQPCFLGMESCGIHKTTFNSIVKSDVDIRKDLYTNTVLSGGTTMYPGIAHRMQKEITALAPSIMKIKIIAPPKRKYSVWVGGSILASLSTFQQMWISKQEYDESGPSIVHRKCF

SEQ ID NO: 31761 - protein, 13 aa, Homo sapiens
MFFMLVEALMSLY

SEQ ID NO: 31762 - protein, 8 aa, Homo sapiens
MVQLRHDH

SEQ ID NO: 31763 - protein, 32 aa, Homo sapiens
MIWEHGEEREEGAKSDHLNLSILDHFMLESPE

SEQ ID NO: 31764 - protein, 107 aa, Homo sapiens [sequence omitted]

SEQ ID NO: 31765 - protein, 55 aa, Homo sapiens
LSFRGMVLGADAVWLWIAPYGQLCPQGRMRIATEVLKSKPNSSHWHTGIRQKAGS

SEQ ID NO: 31766 - protein, 178 aa, Homo sapiens
TSRSPRRSQRCPTPLARPPAASPGSALSCPPTRPRPSAPAAATAATPPAATATATAPGIAFGTAPAPAPAAAPLGTVPAPTSWRLGCSCPKSTRLPTCAPRPATTCTPPSWRPARRRSPWSRSTRWARYWAAAASARSTQASASPTTCRWPSNTWRRTGFPTGESCLMALECPWKWSC

SEQ ID NO: 31767 - protein, 25 aa, Homo sapiens
MKLRLRNQCLQEPGTALGLCRVERW

SEQ ID NO: 31768 - protein, 15 aa, Homo sapiens
ISLRMLLSHTGKLAL

SEQ ID NO: 31769 - protein, 36 aa, Homo sapiens
TQTQKWKTVNDQPRRPCCELWPLPSRAPEPHAGGAG

SEQ ID NO: 31770 - protein, 14 aa, Homo sapiens
RGNLTSGRAPLLHS

SEQ ID NO: 31771 - protein, 55 aa, Homo sapiens
RAFSSSVAVTDKDTFELSTFLDSSKAPQHDRNELPEQRGIGGGLDVPLRPVGFGG

SEQ ID NO: 31772 - protein, 10 aa, Homo sapiens
LEPKRALLLQ

SEQ ID NO: 31773 - protein, 27 aa, Homo sapiens
VTWRLENSMEQGKQRRCAGVYVAFIIM

SEQ ID NO: 31774 - protein, 133 aa, Homo sapiens
RRWAPTLGPRGAANHTGLRPSYPAPSPSTSTFTSPPFHFFLYVFFLLETDSIHIEYNIFVYLTGRGRGGDRGGAGPAAWYSSPRGHWEGDPRPLPSPLCTVLWKRNTHLVSKEFILRRVCVCVCLFFLLNLFK

SEQ ID NO: 31775 - protein, 20 aa, Homo sapiens
TQNAARSSRALQALRPRAGG

SEQ ID NO: 31776 - protein, 72 aa, Homo sapiens
ISSTWAAFHCVRILHVGGALFQPEKMVLRPLSKTFSSMSRFLCGNSDTCSGVLSFLRELKGYKAPENVLYAG

SEQ ID NO: 31777 - protein, 15 aa, Homo sapiens
LKMFFMLVEALMSLY

SEQ ID NO: 31778 - protein, 4 aa, Homo sapiens
MVDI

SEQ ID NO: 31779 - protein, 15 aa, Homo sapiens
MPVPTADLRLPLKCP

SEQ ID NO: 31780 - protein, 16 aa, Homo sapiens
LTFDSSFSPNTGGEKC

SEQ ID NO: 31781 - protein, 83 aa, Homo sapiens
TILRNLLENSGWITQYTPYQPEVSQGRLESLLNYQTMVCDITGLDMASASLLDEGLRLQRRCSCATDTRGGNFLLTPIATHRQ

SEQ ID NO: 31782 - protein, 159 aa, Homo sapiens
VIIEQSWGSPNVTKDGVTVAKSIDLKDKYKNIGAKLVQDVANNTNEESGDGTTTATVLAGSIAKEGFQKISKGANPVEIRRGVMLAVDAVIAELKKQSKPVTTPEEIAQVAMISANGDKEIGNIISDAMKKVGRKGVITVKDGKTLNDELEIIEGMKFD

SEQ ID NO: 31783 - protein, 20 aa, Homo sapiens
MRGHPFIALRPERSHRPAKH

SEQ ID NO: 31784 - protein, 18 aa, Homo sapiens
MPDKIFTFSDSLAPGMAM

SEQ ID NO: 31785 - protein, 14 aa, Homo sapiens
MVLRKEFAFLEHSL

SEQ ID NO: 31786 - protein, 455 aa, Homo sapiens
INIVVIGHVDSGKSTTTGHLIYKCGGIDKRTIEKFEKEAAEMGKGSFKYAWVLDKLKAERERGITIDISLWKFETSKYYVTIIDAPGHRDFIKNMITGTSQADCAVLIVAAGVGEFEAGISKNGQTREHALLAYTLGVKQLIVGVNKMDSTEPPYSQKRYEEIVKEVSTYIKKIGYNPDTVAFVPISGWNGDNMLEPSANMPWFKGWKVTRKDGNASGTTLLEALDCILPPTRPTDKPLRLPLQDVYKIGGIGTVPVGRVETGVLKPGMVVTFAPVNVTTEVKSVEMHHEALSEALPGDNVGFKVKNVSVKDVRRGNVAGDSKNDPPMEAAGFTAQVIILNHPGQISAGYAPVLDCHMAHIACKFAELKEKIDRRSGKKLEDGPKFLKSGDAAIVDMVPGKPMCVESFSDYPPLGRFAVRDMRQTVAVGVIKAVDKKAAGAGKVTKSAQKAQKAK

SEQ ID NO: 31787 - protein, 57 aa, Homo sapiens
LKTCGTRFLVSPLRTPGLSCRLTPAAWLQITSEPSLRWSSLCEGAWRQTSRPAQGAR

SEQ ID NO: 31788 - protein, 101 aa, Homo sapiens
ILSTALRDPHYFEKPDAFNPDHFLDANGALKKNEAFIPFSLGKRICLGEGIARAELFLFFTTILQNFSVASPVAPEDIDLTPQECGVGKIPPTYQICFLPR

SEQ ID NO: 31789 - protein, 44 aa, Homo sapiens
RPLSKTFSSMSRFLCGNSDTCSGVLSFLRELKGYKAPENVLYAG

SEQ ID NO: 31790 - protein, 34 aa, Homo sapiens
VTPVLVCCLSSGNLRGTKLLKMFFMLVEALMSLY

SEQ ID NO: 31791 - protein, 14 aa, Homo sapiens
MTGKYSQTQSDCLG

SEQ ID NO: 31792 - protein, 33 aa, Homo sapiens
INVNPKVHGTISPSLLRTVCFTSWAFAAWGFLM

SEQ ID NO: 31793 - protein, 14 aa, Homo sapiens
MTISGLQAEDEADY

SEQ ID NO: 31794 - protein, 28 aa, Homo sapiens
MSHLHLMTVSHWPATCSSLCLPDYNNSM

SEQ ID NO: 31795 - protein, 263 aa, Homo sapiens
MASCDFSIRTYTYADTPDDFQLHNFSLPEEDTKLKIPLIHRALQLAQRPVSLLASPWTSPTRLKTRGAGNGKGPLKGQPRDIYHQTWARYIVKFLDAYAEHKLQFWAVTAENEPSAGLLSGYPFQCLGFTPEHQRDFIARDLGPTLANGTHHNVRLLMLDDQRLLLPHWAKVVLTDPEAAKYVHGIAVHWYLDFLAPAKATLRETHHLFPNTMLFASEACVGSKFWEQSVRLGSWDRGMQYSHSIITNLLYHVVGWTDWNPSL

SEQ ID NO: 31796 - protein, 9 aa, Homo sapiens
MAGRFNRHG

SEQ ID NO: 31797 - protein, 145 aa, Homo sapiens
MTGLSMDGGGSPKGDVDPFYYGKPGPLRTLPEPSGPLPPSSGLSQPQVHALCPLSPLVTTGCCGQAAERDSCWERPPIPLLLPSLSGDYETVRNGGLIFAGLAFIVGLLILLSKWGGLQGRGADQGTSLLKAAEQAGFRELPREG

SEQ ID NO: 31798 - protein, 19 aa, Homo sapiens
MEQGKQRRCAGVYVAFIIM

SEQ ID NO: 31799 - protein, 176 aa, Homo sapiens
MLLSSASIQRESEIQPPLLEAPTSKLCDSFLGTLLCGSGDDNVTALPSKPKFPHTDELLGSSICRRSPTFCYYYVLQMSRREWGGREQEEERKNNVLKLFSKDNGLQLRQCSCKGHDADFEDASFHIYSLKETNSANQLRELSLSCLKMRSQSAQHHDLGLVTPGMEDPVKFSPNS

SEQ ID NO: 31800 - protein, 214 aa, Homo sapiens
MGEVLTLSVVGVKGTKEPQEQVTPPLLPACWEHLHSLLPPQPGHRVPVTPSSGLQRPQHKLPLPQHQFSVLHRDVAVPHGSTDCSVHRNSGTHATWPVWASSSALTARNPAMLTTTMFVSTKVGSTEQTDNTSSWSPGPGPEVPAWCLGRGFAPEQPVLAGGCPGPQVSNACSLPEPPHPAHRRGGGTPAQGGAGSPGASSDTSLRQKEGRSWH

SEQ ID NO: 31801 - protein, 79 aa, Homo sapiens
MIPQDNENPPQQGEANQNDSVAFEDVAVNFTPDEWALLDPSQKNLYREVMQETLRNLASIEVLWKRDSLKVKVISMEKF

SEQ ID NO: 31802 - protein, 32 aa, Homo sapiens
MCSEGQDVSSFLSQLHDKIDGWDQCVQQSESD

SEQ ID NO: 31803 - protein, 14 aa, Homo sapiens
MPPASPAAPESPPS

SEQ ID NO: 31804 - protein, 53 aa, Homo sapiens [sequence omitted]

SEQ ID NO: 31805 - protein, 45 aa, Homo sapiens
MTHCSTPSHFAKLPSPPTPKQSRQRISGATAPGALLGAKGVYPFP

SEQ ID NO: 31806 - protein, 46 aa, Homo sapiens [sequence omitted]

SEQ ID NO: 31807 - protein, 98 aa, Homo sapiens
MSDHEATKCTSFRDNMKKVFPADGPLVTCVERASSLEYIKAITANEADAVTIDGGLVFEAGLAPYSLKPIVVEIYGSKDDPQTHHYVIAMVKRAPTSS

SEQ ID NO: 31808 - protein, 22 aa, Homo sapiens
MWTSALGRLPVHSAWSYAENRN

SEQ ID NO: 31809 - protein, 39 aa, Homo sapiens
MVKYEIVFYPQPAQLQAGGTLGMLSASIFLLKVLDKVSH

SEQ ID NO: 31810 - protein, 16 aa, Homo sapiens
MLEPDFKILVFLLRAT

SEQ ID NO: 31811 - protein, 87 aa, Homo sapiens
MSEKNSSFRSSTILRLLTCFGSKSSRFAILDMNPLKLIGFISIFFKFVACPVTFYCVEVLNFNLKKFKIFSFLFVLLVSYLGNPSLP

SEQ ID NO: 31812 - protein, 105 aa, Homo sapiens
MSTSISPLYPSLLVWISRYTTASSCSPSLGAGPAGTPRRSPSTVAAAPQRWPPPLTLRWHTSPYPPESPSTCCLYRQALGSWPLALCLQHCHLHVDWEPHSPRTC

SEQ ID NO: 31813 - protein, 104 aa, Homo sapiens
ITTWQGGLIDMDKKSTHRNPEDARAGKYEGKHKRKKRRKQNQNQHRSRHRSVTSFSSDDPMFPSSSSSSSGSQTDSSIEDAAKGKIKKKRREKTNKWEKRKDKI

SEQ ID NO: 31814 - protein, 78 aa, Homo sapiens
KTWLLAATNQLCDSGKGGLSSYFCNMRTLDYLNSELRKLEGTLKPSKKEFGNVLHCCQFSSKNNLAWKLLVQWEFDSP

SEQ ID NO: 31815 - protein, 49 aa, Homo sapiens
VLGADAVWLWIAPYGQLCPQGRMRIATEVLKSKPNSSHWHTGIRQKAGS

SEQ ID NO: 31816 - protein, 7 aa, Homo sapiens
VLLQLPQ

SEQ ID NO: 31817 - protein, 26 aa, Homo sapiens
IFSPQVSNIEESLTRDTSPYEDLGRF

SEQ ID NO: 31818 - protein, 28 aa, Homo sapiens
IASALAQIPQKVLWRYKGKKTIHIRNQH

SEQ ID NO: 31819 - protein, 14 aa, Homo sapiens
LDSWIGSWTNGRMP

SEQ ID NO: 31820 - protein, 112 aa, Homo sapiens
LKSSFLRGLGSWKSNPLRLGGWTILLTLTMGQGEPGGPQGDPWVPHELLLPSLCDSSHASSWGSGSITCAWRGGDSSSHPLVSGHILSNSPVAAVMCSSMGTHLSPFKGTLL

SEQ ID NO: 31821 - protein, 39 aa, Homo sapiens
MPREDTARPQSASQEESSREPDHAGTLIVDISTSRTVIQ

SEQ ID NO: 31822 - protein, 43 aa, Homo sapiens [sequence omitted]

SEQ ID NO: 31823 - protein, 32 aa, Homo sapiens
MVMTCDRAPCCSNFMPDKIFTFSDSLAPGMAM

SEQ ID NO: 31824 - protein, 9 aa, Homo sapiens
RKAQVSPQS

SEQ ID NO: 31825 - protein, 28 aa, Homo sapiens
TLFLKKHRMDIRTISLRMLLSHTGKLAL

SEQ ID NO: 31826 - protein, 106 aa, Homo sapiens
RKSLKLLGFLDVENTPCARHSILYGSLGSVVAGFGHFLFTSRIRRSCDVGVGGFILVTLGCWFHCRYNYARQRIQERIAREEIKKKILYEGTHLDPERKHNGGSSN

SEQ ID NO: 31827 - protein, 41 aa, Homo sapiens
MWGLGTTSSFRWYSSDYRRSFQLNSPVDKMRKTGNSLQLVF

SEQ ID NO: 31828 - protein, 559 aa, Homo sapiens
MKINCSGKIVIARYRKVFRGNKVKNAQLAGAKGVILYSDPADYFAPGVKSYPDGWNLPGGGVQRGNILNLNGAGDPLTPGYPANEYAYRHGIAEAVGLPSIPVHPVGYYDAQKLLEKMGGSAPPDSSWRGSLKVSYNVGPGFTGNFSTQKVKMHIHSTNEVTRIYNVIGTLRGAVEPDRYVILGGHRDSWVFGGIDPQSGAAVVHETVRSFGTLKKEGWRPRRTILFASWDAEEFGLLGSTEWAEDNSRLLQERGVAYINADSSIEGNYTLRVDCTPLMYSLVYNLTKELKSPDEGFEGKSLYESWTKKSPSPEFSGMPRISKLGSGNDFEVFFQRLGIASGRARYTKNWETNKFSGYPLYHSVYETYELVEKFYDPMFKYHLTVAQVRGGMVFELANSIVLPFDCRDYAVVLRKYADKIYNISMKHPQEMKTYSLSFDSLFSAVKNFTEIASKFSERLQDFDKSNPILLRMMNDQLMFLERAFIDPLGLPDRPFYRHVIYAPSSHNKYAGESFPGIYDALFDIESKVDPSKAWGDVKRQISVAAFTVQAAAETLSEVA

SEQ ID NO: 31829 - protein, 266 aa, Homo sapiens
LGPDWHEGLNLKGTKEFSHKIHLEAMCEVKKIYLQDEFRILKKKSFTFPRDHTSVTTNTEMWPVYVELTNEKIYGCDFIVSATGVTPNIEPFLHGNSFDLGEDGGLKVDDHMHTSLPDIYAAGDICTTSWQLSPVWQQMRLWTQARQMGWYAAKCMAAASSGDSIDMDFSFELFAHVTKFFNYKVVLLGKYNAQGLGSDHELMLRCTKGQEYIKVVMQNGRMMGAFLIGETDLEETFENLILNQMNLSSYGEDLLDPNIDIEDYFD

SEQ ID NO: 31830 - protein, 31 aa, Homo sapiens
LNPDTKPSSLEMNMLHFTTTALPDSGIGSGR

SEQ ID NO: 31831 - protein, 18 aa, Homo sapiens
REDRDLMEMLQEKQALPF

SEQ ID NO: 31832 - protein, 16 aa, Homo sapiens
LPLLYNRPWNILEPCR

SEQ ID NO: 31833 - protein, 24 aa, Homo sapiens
LRLPRTGTFATHQILAPGSRERTG

SEQ ID NO: 31834 - protein, 458 aa, Homo sapiens
IQTSSEDIPGRVNLPALGVEVVKAMAMQKIFAREILDSRGNPTVEVDLHTAKGRFRAAVPSGASTGIYEALELRDGDKGRYLGKGVLKAVENINNTLGPALLQKKLSVVDQEKVDKFMIELDGTENKSKFGANAILGVSLAVCKAGAAEKGVPLYRHIADLAGNPDLILPVPAFNVINGGSHAGNKLAMQEFMILPVGASSFKEAMRIGAEVYHHLKGVIKAKYGKDATNVGDEGGFAPNILENNEALELLKTAIQAAGYPDKVVIGMDVAASEFYRNGKYDLDFKSPDDPARHITGEKLGELYKSFIKNYPVVSIEDPFDQDDWATWTSFLSGVNIQIVGDDLTVTNPKRIAQAVEKKACNCLLLKVNQIGSVTESIQACKLAQSNGWGVMVSHRSGETEDTFIADLVVGLCTGQIKTGAPCRSERLAKYNQLMRIEEALGDKAIFAGRKFRNPKAK

SEQ ID NO: 31835 - protein, 19 aa, Homo sapiens
KPRKHTSRLPCQQGAANKR

SEQ ID NO: 31836 - protein, 217 aa, Homo sapiens
TRRASSAAPIPLGLLGAALSSVTLYTRKLAGTMGKKQNKKKVEEVLEEEEEEYVVEKVLDRRVVKGKVEYLLKWKGFSDEDNTWEPEENLDCPDLIAEFLQSQKTAHETDKSEGGKRKADSDSEDKGEESKPKKKKEESEKPRGFARGLEPERIIGATDSSGELMFLMKWKNSDEADLVPAKEANVKCPQVVISFYEERLTWHSYPSEDDDKKDDKN

SEQ ID NO: 31837 - protein, 73 aa, Homo sapiens
LGGVRASFPRFFPPRLVPFPPAPSADLSRRPLPSHRPTQDPGLVTGQCDASRLPRGQRGTHRAWAAPEATRPG

SEQ ID NO: 31838 - protein, 45 aa, Homo sapiens
LRPLSKTFSSMSRFLCGNSDTCSGVLSFLRELKGYKAPENVLYAG

SEQ ID NO: 31839 - protein, 20 aa, Homo sapiens
KAMTLHQIAPGHFPQSFQQI

SEQ ID NO: 31840 - protein, 53 aa, Homo sapiens
LAEKNAFVYFSCWVVRRKGREAKGLPLRRCSARSRPHVPPPPEKRAPVHLGSL

SEQ ID NO: 31841 - protein, 46 aa, Homo sapiens
IFTPSLEKMALRLCTQRKEGEPQVSRRTMRLTEPAGRWRVSRALDI

SEQ ID NO: 31842 - protein, 63 aa, Homo sapiens
LRACTLGSQRGVEGSLLQCWIHKRAFMVCERISVCLGRKLFDLQKSQKTSRTSIKIHQRAFYY

SEQ ID NO: 31843 - protein, 24 aa, Homo sapiens
RQQPQGAAMAPDLSHGCRKLNGGG

SEQ ID NO: 31844 - protein, 169 aa, Homo sapiens
KPVPGFQVAYVVFQKPSGVSAALALKGPLLVSTESHPVKSGIHKWISDYADSVPDPEALRVEVDTFMEAYDQKIAEEEAKAKEEEGVPDEEGWVKVTRRGRRPVLPRTEAASLRVLERERRKRSQKELLNYAWQHRESKMEHLAQLRKKFEEDKQRIELLRAQRKFRPY

SEQ ID NO: 31845 - protein, 8 aa, Homo sapiens
LSSQVFGR

SEQ ID NO: 31846 - protein, 205 aa, Homo sapiens
RNLLSVAYKNVVGAHRSSWRVVSSIEQKTEGAEKKQQMAREYREKIETELRDICNDVLSLLEKFLIPSASQAESKVFYLKMEGDYYRYLAEVAAGDDKKGIVDQSQQAYQEAFEISKKEMQPTHPIRLGLALNFSVFYYEILNSPEKACSLAKTAFDEAIAELDTLSEESYKDSTLIMQLLRDNLTLWTSDTQADEGEAGEGVEN

SEQ ID NO: 31847 - protein, 107 aa, Homo sapiens
MEWQQKAQMVQEDLEKTRAELKTAMSTSHVAEPAENEQDEQDENGAEASADLRADAMAKDRSEEECTTEAEKNERVQKHLKALTSELASARDESKKTANDMIHAENM

SEQ ID NO: 31848 - protein, 684 aa, Homo sapiens
LCGCRHRRVEFPASGRTELFSRIQCSVSSPQSQSGADREQGTGMAKAAAIGIDLGTTYSCVGVFQHGKVEIIANDQGNRTTPSYVAFTDTERLIGDAAKNQVALNPQNTVFDAKRLIGRKFGDPVVQSDMKHWPFQVINDGDKPKVQVSYKGETKAFYPEEISSMVLTKMKEIAEAYLGYPVTNAVITVPAYFNDSQRQATKDAGVIAGLNVLRIINEPTAAAIAYGLDRTGKGERNVLIFDLGGGTFDVSILTIDDGIFEVKATAGDTHLGGEDFDNRLVNHFVEEFKRKHKKDISQNKRAVRRLRTACERAKRTLSSSTQASLEIDSLFEGIDFYTSITRARFEELCSDLFRSTLEPVEKALRDAKLDKAQIHDLVLVGGSTRIPKVQKLLQDFFNGRDLNKSINPDEAVAYGAAVQAAILMGDKSENVQDLLLLDVAPLSLGLETAGGVMTALIKRNSTIPTKQTQIFTTYSDNQPGVLIQVYEGERAMTKDNNLLGRFELSGIPPAPRGVPQIEVTFDIDANGILNVTATDKSTGKANKITITNDKGRLSKEEIERMVQEAEKYKAEDEVQRERVSAKNALESYAFNMKSAVEDEGLKGKISEADKKKVLDKCQEVISWLDANTLAEKDEFEHKRKELEQVCNPIISGLYQGAGGPGPGGFGAQGPKGGSGSGPTIEEVD

SEQ ID NO: 31849 - protein, 273 aa, Homo sapiens
VLTTTAFPFVSVMSWKKALRIPGDLRVATVTLMLAMLSSLLAEGRDSPEDFVFQFKGMCYFTNGTERVRLVTRYIYNREEYARFDSDVGVYRAVTPQGRPDAEYWNSQKEVLEGTRAELDTVCRHNYEVAFRGILQRRVEPTVTISPSRTEALNHHNLLVCSVTDFYPGQIKVRWFRNDQEETAGVVSTPLIRNGDWTFQILVMLEMTPQRGDVYTCHVEHPSLQSPITVEWRAQSESAQSKMLSGVGGFVLGLIFLGLGLIIRQRSQKGLLH

SEQ ID NO: 31850 - skipped

SEQ ID NO: 31851 - protein, 19 aa, Homo sapiens
ITLRFLLLMRTLSAYAKKF

SEQ ID NO: 31852 - protein, 4 aa, Homo sapiens
ISKC

SEQ ID NO: 31853 - skipped

SEQ ID NO: 31854 - protein, 361 aa, Homo sapiens
VKWQDLSEKVVYRRFTEIYEFHKTLKEMFPIEAGAINPENRIIPHLPAPKWFDGQRAAENHQGTLTEYCSTLMSLPTKISRCPHLLDFFKVRPDDLKLPTDNQTKKPETYLMPKDGKSTATDITGPIILQTYRAIADYEKTSGSEMALSTGDVVEVVEKSESGWWFCQMKAKRGWIPASFLEPLDSPDETEDPEPNYAGEPYVAIKAYTAVEGDEVSLLEGEAVEVIHKLLDGWWVIRKDDVTGYFPSMYLQKSGQDVSQAQRQIKRGAPPRRSSIRNAHSIHQRSRKRLSQDAYRRNSVRFLQQRRRQARPGPQSPGSPLEEERQTQRSKPQPAVPPRPSADLILNRCSESTKRKLASAV

SEQ ID NO: 31855 - protein, 7 aa, Homo sapiens
TNLRKTK

SEQ ID NO: 31856 - protein, 4 aa, Homo sapiens
RDFF

SEQ ID NO: 31857 - protein, 12 aa, Homo sapiens
LDSTARGEMLLC

SEQ ID NO: 31858 - protein, 68 aa, Homo sapiens
IRLIWLARRVSPSSLTAPCASLPKLRARSKRTTIPDRGGPVFGQGYTSSCAPLLEPPNKLSRSICRRT

SEQ ID NO: 31859 - protein, 7 aa, Homo sapiens
RVLLLTR

SEQ ID NO: 31860 - protein, 21 aa, Homo sapiens
RSQCDLVKEARKKEGALTIWW

SEQ ID NO: 31861 - protein, 240 aa, Homo sapiens
LVQKAKLAEQAERYDDMAACMKSVTEQGAELSNEERNLLSVAYKNVVGAHRSSWRVVSSIEQKTEGAEKKQQMAREYREKIETELRDICNDVLSLLEKFLIPSASQAESKVFYLKMEGDYYRYLAEVAAGDDKKGIVDQSQQAYQEAFEISKKEMQPTHPIRLGLALNFSVFYYEILNSPEKACSLAKTAFDEAIAELDTLSEESYKDSTLIMQLLRDNLTLWTSDTQADEGEAGEGVEN

SEQ ID NO: 31862 - protein, 18 aa, Homo sapiens
LSLVSWSTCRRSSRISSS

SEQ ID NO: 31863 - protein, 442 aa, Homo sapiens
RKVKYEETVFYGLQYILNKYLKGKVVTKEKIQEAKDVYKEHFQDDVVNEKGWNYILEKYDGHLPIEIKAVPEGFVIPRGNVLFTVENTDPECYWLTNWIETILVQSWYPITVATNSREQKKILAKYLLETSGNLDGLEYKLHDFGYRGVSSQETAGIGASAHLVNFKGTDTVAGLALNKKYYGTKDPVPGYSVPAAEHSTITAWGKDHEKDAFEHIVTQFSSVPVSVVSNSYDIYNACEKIWGEDLRHLIVSRSTQAPLIIRPDSGNPLDTVLKVLEILGKKFPVTENSKGYKLLPPYLRVIQGDGVDINTLQEIVEGMKQKMWSIENIAFGSGGGLLQKLTRDLLNCSFKCSYVVTNGLGINVFKDPVADPNKRSKKGRLSLHRTPAGNFVTLEEGKGDLEEYGQDLLHTVFKNGKVTKSYSFDEIRKNAQLNIELEAAHH

SEQ ID NO: 31864 - protein, 522 aa, Homo sapiens
MLGQLAPAGTGCFDLLLDAEKCKYGMEIPTNIPGLGAAGPTGMFFGSAPSPMGGISPAMTPWNQGATPAYGAWSPSVGSGMTPGAAGFSPSAASDASGFSPGYSPAWSPTPGSPGSPGPSSPYIPSPGGAMSPSYSPTSPAYEPRSPGGYTPQSPSYSPTSPSYSPTSPSYSPTSPNYSPTSPSYSPTSPSYSPTSPSYSPTSPSYSPTSPSYSPTSPSYSPTSPSYSPTSPSYSPTSPSYSPTSPSYSPTSPSYSPTSPSYSPTSPSYSPTSPSYSPTSPSYSPTSPNYSPTSPNYTPTSPSYSPTSPSYSPTSPNYTPTSPNYSPTSPSYSPTSPSYSPTSPSYSPSSPRYTPQSPTYTPSSPSYSPSSPSYSPTSPTSTPQPVLLTVPAPQSIPQPLPSTHLPVPNIHPPLPSTRLPVPPIHPPPQNTPQHLLLIPQPLQSTPQPLPSTHLLAPLTRPLPPSTRPPAPPTRPPPPKAQPTLPLPLVTRPPAPPTVSQARLSARMTVTRRTEGTWGAAAG

SEQ ID NO: 31865 - protein, 47 aa, Homo sapiens
LIFPTLSVRSPPPLDARAPGLVGCAAPRTASHQPAPSLSCSTLICTP

SEQ ID NO: 31866 - protein, 51 aa, Homo sapiens
IEVQFMCLWVWMAQSVSGLRKADLAPTLTLTDPGIYSRNWKPSATGAWRSS

SEQ ID NO: 31867 - protein, 16 aa, Homo sapiens
VLLSEAVGFSLRDKKK

SEQ ID NO: 31868 - protein, 364 aa, Homo sapiens
MFLVKWQDLSEKVVYRRFTEIYEFHKTLKEMFPIEAGAINPENRIIPHLPAPKWFDGQRAAENHQGTLTEYCSTLMSLPTKISRCPHLLDFFKVRPDDLKLPTDNQTKKPETYLMPKDGKSTATDITGPIILQTYRAIADYEKTSGSEMALSTGDVVEVVEKSESGWWFCQMKAKRGWIPASFLEPLDSPDETEDPEPNYAGEPYVAIKAYTAVEGDEVSLLEGEAVEVIHKLLDGWWVIRKDDVTGYFPSMYLQKSGQDVSQAQRQIKRGAPPRRSSIRNAHSIHQRSRKRLSQDAYRRNSVRFLQQRRRQARPGPQSPGSPLEEERQTQRSKPQPAVPPRPSADLILNRCSESTKRKLASAV

SEQ ID NO: 31869 - protein, 21 aa, Homo sapiens
RFGRNCFLSGSPEYPEESVWN

SEQ ID NO: 31870 - protein, 29 aa, Homo sapiens
VVKIGKESRSQCDLVKEARKKEGALTIWW

SEQ ID NO: 31871 - protein, 10 aa, Homo sapiens
IIRPPQVYSL

SEQ ID NO: 31872 - protein, 1988 aa, Homo sapiens
LRSAPASAMHGGGPPSGDSACPLRTIKRVQFGVLSPDELKRMSVTEGGIKYPETTEGGRPKLGGLMDPRQGVIERTGRCQTCAGNMTECPGHFGHIELAKPVFHVGFLVKTMKVLRCVCFFCSKLLVDSNNPKIKDILAKSKGQPKKRLTHVYDLCKGKNICEGGEEMDNKFGVEQPEGDEDLTKEKGHGGCGRYQPRIRRSGLELYAEWKHVNEDSQEKKILLSPERVHEIFKRISDEECFVLGMEPRYARPEWMIVTVLPVPPLSVRPAVVMQGSARNQDDLTHKLADIVKINNQLRRNEQNGAAAHVIAEDVKLLQFHVATMVDNELPGLPRAMQKSGRPLKSLKQRLKGKEGRVRGNLMGKRVDFSARTVITPDPNLSIDQVGVPRSIAANMTFAEIVTPFNIDRLQELVRRGNSQYPGAKYIIRDNGDRIDLRFHPKPSDLHLQTGYKVERHMCDGDIVIFNRQPTLHKMSMMGHRVRILPWSTFRLNLSVTTPYNADFDGDEMNLHLPQSLETRAEIQELAMVPRMIVTPQSNRPVMGIVQDTLTAVRKFTKRDVFLERGEVMNLLMFLSTWDGKVPQPAILKPRPLWTGKQIFSLIIPGHINCIRTHSTHPDDEDSGPYKHISPGDTKVVVENGELIMGILCKKSLGTSAGSLVHISYLEMGHDITRLFYSNIQTVINNWLLIEGHTIGIGDSIADSKTYQDIQNTIKKAKQDVIEVIEKAHNNELEPTPGNTLRQTFENQVNRILNDARDKTGSSAQKSLSEYNNFKSMVVSGAKGSKINISQVIAVVGQQNVEGKRIPFGFKHRTLPHFIKDDYGPESRGFVENSYLAGLTPTEFFFHAMGGREGLIDTAVKTAETGYIQRRLIKSMESVMVKYDATVRNSINQVVQLRYGEDGLAGESVEFQNLATLKPSNKAFEKKFRFDYTNERALRRTLQEDLVKDVLSNAHIQNELEREFERMREDREVLRVIFPTGDSKVVLPCNLLRMIWNAQKIFHINPRLPSDLHPIKVVEGVKELSKKLVIVNGDDPLSRQAQENATLLFNIHLRSTLCSRRMAEEFRLSGEAFDWLLGEIESKFNQAIAHPGEMVGALAAQSLGEPATQMTLNTFHYAGVSAKNVTLGVPRLKELINISKKPKTPSLTVFLLGQSARDAERAKDILCRLEHTTLRKVTANTAIYYDPNPQSTVVAEDQEWVNVYYEMPDFDVARISPWLLRVELDRKHMTDRKLTMEQIAEKINAGFGDDLNCIFNDDNAEKLVLRIRIMNSDENKMQEEEEVVDKMDDDVFLRCIESNMLTDMTLQGIEQISKVYMHLPQTDNKKKIIITEDGEFKALQEWILETDGVSLMRVLSEKDVDPVRTTSNDIVEIFTVLGIEAVRKALERELYHVISFDGSYVNYRHLALLCDTMTCRGHLMAITRHGVNRQDTGPLMKCSFEETVDVLMEAAAHGESDPMKGVSENIMLGQLAPAGTGCFDLLLDAEKCKYGMEIPTNIPGLGAAGPTGMFFGSAPSPMGGISPAMTPWNQGATPAYGAWSPSVGSGMTPGAAGFSPSAASDASGFSPGYSPAWSPTPGSPGSPGPSSPYIPSPGGAMSPSYSPTSPAYEPRSPGGYTPQSPSYSPTSPSYSPTSPSYSPTSPNYSPTSPSYSPTSPSYSPTSPSYSPTSPSYSPTSPSYSPTSPSYSPTSPSYSPTSPSYSPTSPSYSPTSPSYSPTSPSYSPTSPSYSPTSPSYSPTSPSYSPTSPSYSPTSPNYSPTSPNYTPTSPSYSPTSPSYSPTSPNYTPTSPNYSPTSPSYSPTSPSYSPTSPSYSPSSPRYTPQSPTYTPSSPSYSPSSPSYSPTSPTSTPQPVLLTVPAPQSIPQPLPSTHLPVPNIHPPLPSTRLPVPPIHPPPQNTPQHLLLIPQPLQSTPQPLPSTHLLAPLTRPLPPSTRPPAPPTRPPPPKAQPTLPLPLVTRPPAPPTVSQARLSARMTVTRRTEGTWGAAAG

SEQ ID NO: 31873 - protein, 16 aa, Homo sapiens
IDLEILLIFTPSPRDS

SEQ ID NO: 31874 - protein, 26 aa, Homo sapiens
VGCAAPRTASHQPAPSLSCSTLICTP

SEQ ID NO: 31875 - protein, 55 aa, Homo sapiens
RSSLIEVQFMCLWVWMAQSVSGLRKADLAPTLTLTDPGIYSRNWKPSATGAWRSS

SEQ ID NO: 31876 - protein, 14 aa, Homo sapiens
TLTKLVQHLPWATC

SEQ ID NO: 31877 - protein, 95 aa, Homo sapiens
RLGGWTILLTLTMGQGEPGGPQGDPWVPHELLLPSLCDSSHASSWGSGSITCAWRGGDSSSHPLVSGHILSNSPVAAVMCSSMGTHLSPFKGTLL

SEQ ID NO: 31878 - protein, 37 aa, Homo sapiens
TQGASVRHMEVMVFLREKITEETSALMALQSWQYYNP

SEQ ID NO: 31879 - protein, 20 aa, Homo sapiens
TKKLPEHLGEYLMENRLVKT

SEQ ID NO: 31880 - protein, 85 aa, Homo sapiens
RKNFLPRLCRMKSFPAWQLFFHKRGLSQDLVATGSATAENVLPCGFLSSCPWPEVPALMAAPHLQLLCSPLPKPYGLPCICIHPV

SEQ ID NO: 31881 - protein, 28 aa, Homo sapiens
MECATLHLGMQIFVLKKTEKNKKKNMYF

SEQ ID NO: 31882 - protein, 31 aa, Homo sapiens
KWKSLLSQQLLCKMPRPGIVAEHPRPAEVPP

SEQ ID NO: 31883 - protein, 26 aa, Homo sapiens
VDFLAERMLAVPVTCGDTARSALQIY

SEQ ID NO: 31884 - protein, 74 aa, Homo sapiens
LPLLILSRSAALQCDESESSSHPARAFLLLPALFYFSFGRRRHCCTQLVSVPRFYPQVVPAAYGPGRLGYFCSR

SEQ ID NO: 31885 - protein, 4 aa, Homo sapiens
MDSW

SEQ ID NO: 31886 - protein, 10 aa, Homo sapiens
IHQDNTSGVY

SEQ ID NO: 31887 - protein, 30 aa, Homo sapiens
IVGNGGGREAFPLRLGWGGSVLLACREGGE

SEQ ID NO: 31888 - protein, 20 aa, Homo sapiens
MNASRHPSFPGVKVFRCCIF

SEQ ID NO: 31889 - protein, 19 aa, Homo sapiens
MFTLTFPVMSSCRCLLMQE

SEQ ID NO: 31890 - protein, 22 aa, Homo sapiens
LHMPKNFKQMKATNLKLRNLPF

SEQ ID NO: 31891 - protein, 29 aa, Homo sapiens
IFCSDLTQPLQMDPCTPLSDEVIVVGVCS

SEQ ID NO: 31892 - protein, 68 aa, Homo sapiens
LRAPARSQKGEGRRELACGTPDRRGCAFPAPGPSRHTRSSPLARANAQDDHHPRVCHHLRLERSFMQG

SEQ ID NO: 31893 - protein, 64 aa, Homo sapiens
KLNLVRWTLGQTARERQARGLTSSTPEFEPYEQWNLGTTKDPDIILSSVIEKRIWDLRRYLLIF

SEQ ID NO: 31894 - protein, 46 aa, Homo sapiens
MVAVVRLSDSGWCGQILQDLTSKKTGGGAGGGGEDVWPMHAECKAA

SEQ ID NO: 31895 - protein, 34 aa, Homo sapiens
MRACFPVCIFSCGHKKHQLGFPKVRKWLLINLLE

SEQ ID NO: 31896 - protein, 100 aa, Homo sapiens [sequence omitted]

SEQ ID NO: 31897 - protein, 48 aa, Homo sapiens
MTQSPQLQSKDGFSWNLERANPVRQPVILEVKEQKKKKKGKISHKISI

SEQ ID NO: 31898 - protein, 9 aa, Homo sapiens
MVLCFHSFG

SEQ ID NO: 31899 - protein, 73 aa, Homo sapiens
MVLLRAVLPGPPQRGTLLGAPQRGTLPGGSSARHSPGGSSVRFSQTLLSAALPISLGGFEHGQHGPGRTARDG

SEQ ID NO: 31900 - protein, 190 aa, Homo sapiens [sequence omitted]

SEQ ID NO: 31901 - protein, 50 aa, Homo sapiens [sequence omitted]

SEQ ID NO: 31902 - protein, 11 aa, Homo sapiens
MRETIRKTEKL

SEQ ID NO: 31903 - protein, 30 aa, Homo sapiens
MPHISHKGEPPEGSWGCGILEAQKFSPPVL

SEQ ID NO: 31904 - protein, 40 aa, Homo sapiens
MDLDVWVPFLLPWQKLTHPSVSIQNGISSWAPSPESPASR

SEQ ID NO: 31905 - protein, 48 aa, Homo sapiens [sequence omitted]

SEQ ID NO: 31906 - protein, 10 aa, Homo sapiens
MKTTIKETST

SEQ ID NO: 31907 - protein, 20 aa, Homo sapiens
MKLRMCPWWTLLDPACTLLG

SEQ ID NO: 31908 - protein, 55 aa, Homo sapiens
MLQLSHAVDENEGYDHCVGGVCVAIAGITCGIVERLSVGKKTHSEVTPIYVKLSP

SEQ ID NO: 31909 - protein, 53 aa, Homo sapiens
MLQLSHAVDENEGYDHCVGGVCVAIAGITNAEDKASKQKNFQKNHRVLDLEKN

SEQ ID NO: 31910 - protein, 350 aa, Homo sapiens [sequence omitted]

SEQ ID NO: 31911 - protein, 466 aa, Homo sapiens
MQQNIHDFECQCHNDERNYREIPAIKIKNITGRRDQGDGRNAGNKPVENQLELSFWLHLAELQGFQIERKIYECNQIEKSVTRGSSVSLLQTNLPCVNTSISNIYRNDFMHPSLLTQDQKAYIREKPYKCSDCGKAFNQRSNLTTHQRIHTGQKPHKCDICGKGFRRIANLASHHRIHTGEKPYRCNECGKTFNQTFNLTTHQRIHTGQKPYKCDRCGKGFRQIGNLASHHRIHTGEKPYRCNECGKTFNRMFHLTRHQRIHTGQKPYKCDICGKGFRQIANLASHHRIHTGEKPYKCSDCGKTFNYRSHLTRHQRIHTGQKPYKCDTCGKDFSQNSYLENHQRIHTREKSYRCNECGKTFNKMTNLTTHQRIHTGQKTYKCDICGKGFRQIGNLASHHRIHTGEKPYRCNECGKTFNRMFHLTRHQRIHTGQKPYKCDICGKSFSQNSYLENHQRIHTGEKTYKL

SEQ ID NO: 31912 - protein, 195 aa, Homo sapiens
MSRPLGQSRRRPPDPIARWQRSRRLQAEGPAGVPLGEPVFPQGLLQAQPALGVVLAQESLGTAWVTERDSVSKKKKKAWVTMSLFQEWFLHFCSTVEGAAPSTTFPTRGCPSWTALPATLGVETESGSVAQAGVRWRDLGSLQPPPPGFTPFSCLSLPGSWDYRRPPPRPANFFVFLVETGFHRVSQNGLGLLTP

SEQ ID NO: 31913 - protein, 28 aa, Homo sapiens
MQLKDSLGPGSNCPLWTLRPLHLRVVCL

SEQ ID NO: 31914 - protein, 56 aa, Homo sapiens
MEPSKRPSPSLLTNHGHSWPNKTSWPGFEPCFPDLGTLHLPLLLQMIGYSSDLALP

SEQ ID NO: 31915 - protein, 71 aa, Homo sapiens
MAHCSLELLSSSHPPTSAFRVAGTAGVSHHAWLICLFKFFIETESQLYCPGWKRTSFPPSDNLFQTSQLKN

SEQ ID NO: 31916 - protein, 22 aa, Homo sapiens
MGNRQEMTRTASLRLCSRPSLC

SEQ ID NO: 31917 - protein, 15 aa, Homo sapiens
MGLLCAEAPWDVLSS

SEQ ID NO: 31918 - protein, 44 aa, Homo sapiens [sequence omitted]

SEQ ID NO: 31919 - protein, 56 aa, Homo sapiens
MKSEESDHRRKPFQISVDISPELHVYMTRAPQRQQPQGAAMAPDLSHGCRKLNGGG

SEQ ID NO: 31920 - protein, 45 aa, Homo sapiens
MKSEESDHRRKPFQINHLRRARFHFCGQDFYIMAGPIVLPCVLCY

SEQ ID NO: 31921 - protein, 69 aa, Homo sapiens
MESPLGEEHTDRHRQAIDQRDKVGSMSSQGCLRGKEEAMRVRVKGRLEDTTLRTLKMKEGAKTKNVGSL

SEQ ID NO: 31922 - protein, 39 aa, Homo sapiens
MRRAESTELQANTSGFFFFFCFFIRSNSCCILKNQEEKS

SEQ ID NO: 31923 - protein, 327 aa, Homo sapiens [sequence omitted]

SEQ ID NO: 31924 - protein, 255 aa, Homo sapiens
MASGRQVLDQDPVEVSGRAVGATVFSNASTRRMDFLQALRDSGPSGTFPDLGGSGPQLPGSTAAASLASWWVEGLRTQSADPEARRRPGVRGPPCPSISKAFCLSAPLTGHPGWTGLAYAPQRVRHPQQGLGVLCPRLTWKGGRKDAVVPFSGQIFWPDSAFRAATSGDSALPPWRPPGRLAALGDPSVDTPVKTGLPGSRLSQSAPRSVPVRASSSRVPATLGQTWKPSGRRRRPGLGCADTAPATFLRRWRDC

SEQ ID NO: 31925 - protein, 54 aa, Homo sapiens
MPRPPETMCQARIALDRSSPSWNSYGTLAPETTNSSLKFSNSNNGVCLAEESVM

SEQ ID NO: 31926 - protein, 479 aa, Homo sapiens
MLLKNPVQFIQGELQLQDVNDHAPEFLENEILLKISEGSHPGTSFPLKIAQDLDVGSNTVQNYSISTNSYFHLFTRNHSDGKKYPELVLDQALDREEQPQLRLTLTALDGGSPPRTGTSQVLIVIVDINDNVPEFAQRRYEVQVPENTPIGSLVITVSARDLDAGTHGELSYSFFQYSNQIIQAFEINSITGEIRFKKALDFEEIQSYHMEVEASDGGGLSGKCTVAIEVMDINDNAPELTMSLLISDILENSPETVVAVFGISDPDSGNNGKMMCSIQDHLPFLLKPTLENFYTLLTEGALDRESRAEYNITITVTDLGTPRLKTEYNITLRVSDVNDNAPAFTQTSYTLFVRENNSPALHIGSVSATDRDSGTNAQVTYSLLPPQNPHLPLASLVSINTDNGHLFALRSLDYEALQEFEFRVGASDRGSPALSSEALVRVLVCWTPTTTRPSCCTRCRTAPRPAPSWCPGRPSRATW

SEQ ID NO: 31927 - protein, 734 aa, Homo sapiens
MWKTWLQGGARVIFDDYKPYLRLDPQNGDLLLNEQLDREALCDLTEPCILHFQVLFENPLQFFRAELLVKDINDHTPTFLNNHMLLKISEGATLGTLFQIDSAQDLDVGKNGVQNYTISPNPHFHLKLRDSDEGRKYPELVLDQSLDREKVSEFSLTLTAVDGGSPPRSGTTLINVVVLDISDNAPEFEKPVYEVLVPESSPLDSLIIKASATDLDAGINGELSYSFSHVSRDVRKTFEIHPISGEVYLKAPLDFEIIQSYIINIQAIEGGSLSGKSSILVRVVDVNDNPPEIAMTSLTSPIPENSSPEMVVAVFSIRDQDAGDNGRTVCSIQDNLPFVLKPTFKNFYALVTEHPLDREVRNEYNITITVTDLGTPRLKTEHNITVLVSDVNDNAPIFTQTSYTLFVRENNSPALHIGSVSATDRDSGTNAQVTYSLLPPQDPHLPLTSLVSINADNGHLFALRSLDYEALQEFGFRVGAADHGSPALSSEVLVRVLVLDANDNSPFVLYPLQNGSAPCTELVPRAAEPGYLVTKVVAVDGDSGQNAWLSYQLLKATEPGLFGVWAHNGEGRTARLLSERDAAKHRLVVLVKDNGEPPRSATATLHVLLVEGFSQPYLPLTEAAPSQAQADSLTVYLVVALASVSSLFLFSVFLFVAVRLCRRSRAASMGRCSVPECPFPGHLVDVSGTGTLSQSYQYEVCLTGGSGANEFKFLKPVIPNLLSRDSEMEKAPPF

SEQ ID NO: 31928 - protein, 203 aa, Homo sapiens
MEPAAALHFSRPASLLLLLSLCALVSAQVTVVGPTDPILAMVGENTTLRCCLSPEENAEDMEVRWFQSQFSPAVFVYKGGRERTEEQKEEYRGRTTFVSKDSRGSVALIIHNVTAEDNGIYQCYFQEGRSCNEAILHLVVAGALLHFALLLWHCVTLGKASLLNSSPLQTSTILFPGSPFRRDTLPMKRRFQGKILPPAQGPP

SEQ ID NO: 31929 - protein, 66 aa, Homo sapiens [sequence omitted]

SEQ ID NO: 31930 - protein, 9 aa, Homo sapiens
MNWREVCFA

SEQ ID NO: 31931 - protein, 21 aa, Homo sapiens
MAQECLPSVSVSTAAIPRCWS

SEQ ID NO: 31932 - protein, 12 aa, Homo sapiens
MPRVHETGRRPC

SEQ ID NO: 31933 - protein, 19 aa, Homo sapiens
MMEQKNRRGLDSLPSHFLL

SEQ ID NO: 31934 - protein, 1103 aa, Homo sapiens
MKAKEEELRKAMAQTQELVNKVKELEEKTATLSQEKNDLTIQLQAEQENLMDAEERLTWMMKTKMDLESQISDMRERLEEEEGMAASLSAAKRKLEGELSDLKRDLEGLETTLAKTEKEKQALDHKVRTLTGDLSLREDSITKLQKEKRALEELHQKTLDDLQAEEDKVNHLTKNNSKLSTQIHELEDNWEQEKKIRAEVEKARRKAESDLKMTIDNLNEMERSKLDLEEVVKKRDLEINSVNSKYEDEQSLNSTLQRKLKEHQDRIEELEEELEAERAMRAKVEKQRSDLSRDLEDLSDRLEEAGGATSAQIEQNRKREAELLKLRRELEEAALQSEATASTLRKKHVDSMAELTEHVESLQRVKSKLEKDKQVMKAEIDDLNASMETIQKSKMNAEAHVRKLEDSLSEANAKVAELERNQAEINAIRTRLQAENSELSREYEESQSRLNQILRIKTSLTSQVDDYKRQLDEESKSRSTAVVSLANTKHDLDLVKEQLEEEQGGKSELQRLVSKLNTEVTTWRTKYETDAIQRTEELEETKRKLAARLQEAEEAAETAQARAASLEKNKQRLQAEVEDLTIDLEKANAAAAALDKKQRLFDKMLAEWQQKCEELQVEVDSSQKECRMYMTESFKIKTAYEESLEHLESVKKENKTLQEEIKDLIDQLGEGGRSVHELQKLKKKLEMEKEELQVALEEAESSLEVEESKVIRIQLELAQVKADIDRRIHEKEEEFEATRKNHQRAIESLQASLEAEAKGRAEALRLKKKMETDLNEMEIQLDHANKNNSELVKTLKRLQQQIKDLQVQMDEDARQHEELRKQYNLQERRLSLLQTELEEVRSALEGSERSRKLLEQEVVEITEWHNEINIQNQSLLVVKRKLESDVQRISNEHEELISEFRLTEERAKKAMMDAARMAEELRQEQDHCMHLEKIKKNYEVTIKDLQAKMEEAEQLALKGGKRTIMKLEARIKELETELDGEQKQHVETVKTLCKNERRLKELVFQTEEDHKTNQRMQALVEKLQNKLKVYKRQIEEAEDQANQTLARYRKTVHELDDAEDRAGMAETALNKLRTRHRVAGKGITSVEIIQVSKTGTSKTLSEE

SEQ ID NO: 31935 - protein, 21 aa, Homo sapiens
MFKNTSASLPQVWHAAFWKEN

SEQ ID NO: 31936 - protein, 12 aa, Homo sapiens
MEVLQSTSRRTA

SEQ ID NO: 31937 - protein, 19 aa, Homo sapiens
MLKKIFSLQTKDLRVFGEL

SEQ ID NO: 31938 - protein, 71 aa, Homo sapiens
MDSWKYLLKASVEPSITHCPQLLLLPSPAPSRSPGVPAADDVKCGVGPGRSCSMQQRSALCEKLKTCCNTS

SEQ ID NO: 31939 - protein, 75 aa, Homo sapiens [sequence omitted]

SEQ ID NO: 31940 - protein, 8 aa, Homo sapiens
MPSESTWP

SEQ ID NO: 31941 - protein, 27 aa, Homo sapiens
MLWCLRPCPPPSYTVLCNENMGNKDLM

SEQ ID NO: 31942 - protein, 16 aa, Homo sapiens
LARTRRVFPPTASRWW

SEQ ID NO: 31943 - protein, 29 aa, Homo sapiens
RYGAGCRCSVALDSTLWTVVSPRKDENSY

SEQ ID NO: 31944 - protein, 10 aa, Homo sapiens
VSPRKDENSY

SEQ ID NO: 31945 - protein, 8 aa, Homo sapiens
MVSETVSK

SEQ ID NO: 31946 - protein, 30 aa, Homo sapiens
MRRSRRRRGGDRTEDGPCREEQAGENESRL

SEQ ID NO: 31947 - protein, 36 aa, Homo sapiens
MKSLGALWMCRRVGLPFYRPFAELRGQSRRQSRMQP

SEQ ID NO: 31948 - protein, 15 aa, Homo sapiens
KDLEPRAANCTRVLV

SEQ ID NO: 31949 - protein, 8 aa, Homo sapiens
LTTTGTSH

SEQ ID NO: 31950 - protein, 16 aa, Homo sapiens
LGGTGEVMRNVDYTPL

SEQ ID NO: 31951 - protein, 17 aa, Homo sapiens
LISKMLLKAHGHDCTPH

SEQ ID NO: 31952 - protein, 11 aa, Homo sapiens
VAQAELRALIL

SEQ ID NO: 31953 - skipped

SEQ ID NO: 31954 - protein, 4 aa, Homo sapiens
MEQK

SEQ ID NO: 31955 - protein, 48 aa, Homo sapiens
LGGDRVSCQFLTATSHQWLHSVSLTQHMAQECLPSVSVSTAAIPRCWS

SEQ ID NO: 31956 - protein, 24 aa, Homo sapiens
IPDTISWLSVASMEVLQSTSRRTA

SEQ ID NO: 31957 - protein, 9 aa, Homo sapiens
KDLRVFGEL

SEQ ID NO: 31958 - protein, 80 aa, Homo sapiens
VKSSILPAGLPAPPSFSPRPPSPPPAGAIRRHPPSLPPHPQVRGVSSGSGDPEEPSRVTICSATWQELEEGMIFSGVFLR

SEQ ID NO: 31959 - protein, 10 aa, Homo sapiens
VWHAAFWKEN

SEQ ID NO: 31960 - protein, 80 aa, Homo sapiens
IKKFVIRNIVEAAAVRDISEASVFDAYVLPKLYVKLHYCVSCAIHSKVVRNRSREVRKDRTPPPRFRPAGAAPRPPPKPM

SEQ ID NO: 31961 - protein, 61 aa, Homo sapiens
VPGLEDQEKESQVVCWRLEPRHRGAARLAAVGGGGGHCSAAGGVRYSCTSSGDPRMRGTRW

SEQ ID NO: 31962 - protein, 70 aa, Homo sapiens
RKKREARKQANRTIPTSEQEKMGACWQSWGLAVVTLNLLFGVFMSGGKNRDHMEPTQEALAVTQQAGRQF

SEQ ID NO: 31963 - protein, 28 aa, Homo sapiens
ISRFLSSAIVVFWWRKKNRVAVFELPGT

SEQ ID NO: 31964 - protein, 39 aa, Homo sapiens
LSEIKTSTIAMLIGQRMCCGHKTKLWRTEDSFQGSACIQ

SEQ ID NO: 31965 - protein, 31 aa, Homo sapiens
KSRMGLVARVSQTRERHSPSIDSSSVFKREI

SEQ ID NO: 31966 - protein, 7 aa, Homo sapiens
LRHLKPS

SEQ ID NO: 31967 - protein, 33 aa, Homo sapiens
VSVSELCSRRRGETREAIVATLRLLVSSQAVRP

SEQ ID NO: 31968 - protein, 16 aa, Homo sapiens
MGSKITLLEAAGEKHS

SEQ ID NO: 31969 - protein, 5 aa, Homo sapiens
MCLFC

SEQ ID NO: 31970 - protein, 8 aa, Homo sapiens
VNDKDARG

SEQ ID NO: 31971 - protein, 5 aa, Homo sapiens
KISNR

SEQ ID NO: 31972 - protein, 90 aa, Homo sapiens
RGRVELGSPCLVGERELTYPQQQLRDDDVGELGRQVEWGAQLWVLYAGVERPVSRMGQKQENGSHVLGLHGGPQLAAQRLLRGAQRRQEQ

SEQ ID NO: 31973 - protein, 75 aa, Homo sapiens
ITPSEVTPEGGLEGESNERERERKEGREGGRMEGCMDLDVWVPFLLPWQKLTHPSVSIQNGISSWAPSPESPASR

SEQ ID NO: 31974 - skipped

SEQ ID NO: 31975 - protein, 38 aa, Homo sapiens
LENSLTSLIEYLHNALEHDMRLRFNNDRMKTTIKETST

SEQ ID NO: 31976 - protein, 34 aa, Homo sapiens
IHPKAGLQSLQFIMELLYWLLEGGDSEDKEVKPV

SEQ ID NO: 31977 - protein, 6 aa, Homo sapiens
KSLRGN

SEQ ID NO: 31978 - protein, 226 aa, Homo sapiens
LGATPPGDPTRRASSAAPIPLGLLGAALSSVTLYTRKLAGTMGKKQNKKKVEEVLEEEEEEYVVEKVLDRRVVKGKVEYLLKWKGFSDEDNTWEPEENLDCPDLIAEFLQSQKTAHETDKSEGGKRKADSDSEDKGEESKPKKKKEESEKPRGFARGLEPERIIGATDSSGELMFLMKWKNSDEADLVPAKEANVKCPQVVISFYEERLTWHSYPSEDDDKKDDKN

SEQ ID NO: 31979 - protein, 32 aa, Homo sapiens
MTEGEGRAFEGRRRGWRKKLDHLVTWKERSEL

SEQ ID NO: 31980 - protein, 83 aa, Homo sapiens
LAQGWSAGGLQVQSGKCESSVLGYSATCLPDMGRWRVSSVESWPFASTGGKLAIATAGTGTQAAPRPFLIRPPDSWALALALM

SEQ ID NO: 31981 - protein, 72 aa, Homo sapiens
LIPSETASTSPAASGFFMWLQMAGFPKGFWLKHIPWCICTAVSSSLQLCLNRSFTMLSSRFNSMAPNDEISF

SEQ ID NO: 31982 - protein, 155 aa, Homo sapiens
KPSGVSAALALKGPLLVSTESHPVKSGIHKWISDYADSVPDPEALRVEVDTFMEAYDQKIAEEEAKAKEEEGVPDEEGWVKVTRRGRRPVLPRTEAASLRVLERERRKRSQKELLNYAWQHRESKMEHLAQLRKKFEEDKQRIELLRAQRKFRPY

SEQ ID NO: 31983 - protein, 112 aa, Homo sapiens
MPLSRRSGDSPAPRIPGWRDASRPRGLVARAGRRTRRRALPGLAWACSEPGCFSVTTQIGGIWRFCGSPAAKLRGRRGLEACTTCSPRPSMHPGKRLCFSVRAKVCKEGGGN

SEQ ID NO: 31984 - protein, 14 aa, Homo sapiens
MISVMEIGLKRLLF

SEQ ID NO: 31985 - protein, 35 aa, Homo sapiens
MPFFLSSYFRYPIECFLLPGRVRKLCVSGDHGYHS

SEQ ID NO: 31986 - protein, 296 aa, Homo sapiens [sequence omitted]

SEQ ID NO: 31987 - protein, 26 aa, Homo sapiens
MRRSSRSFRHVAHAPQIFVEREGKWP

SEQ ID NO: 31988 - protein, 138 aa, Homo sapiens
MLPQNSAPCHQEAVNTGLHSYAYPYSNSSYMYFFRRGNKTARWEGVSGKLHLACALGWNLRKLMTFVAGSSLAPPLPVWNLKFHRLGRKRSSRDSGFAEHPCFPVFPFSPNKTLLHSPFKPSASLNFCGCGTDKDAFS

SEQ ID NO: 31989 - protein, 35 aa, Homo sapiens
MAAEGGDGLGGGGGADWLPEKRRTRARQQSSLWMT

SEQ ID NO: 31990 - protein, 5 aa, Homo sapiens
MLPAE

SEQ ID NO: 31991 - protein, 499 aa, Homo sapiens
MFFIGSFLKFMGKTNEAEELFLSVEDMLVQSQSMTDMLLKVQNAIGELYLETGMTQEGFQYFQKAWSSMLRLSLSDLEDSRDLVKQKVRVLDNLAKSASEEYLKENHILEYATEISNLLDNNPRDQATMKYIEGVLMFVAGNTSLAKMKLRECLNIRKSLFGKKNMLVGEVMEFLADLLFFPQRDSKKSQRKQVLKYYKQVIKIKENAETLAKSSLLRKQLSISLSDTLCKLAGHLLASDSCHHVMIEAVGYLYRSVDLRVIHLGSSHSSIHGIHGILHLLREIEWIRSRRYWPQGMSQQHSEGSRNGFSLWEHLVKLNYHSAQSSNTVSSAMCMNADKLHRARRMDLAPQTISDKSKCAPGKGKKKPIICISAEEKIQRKTQNNAEIWNGSGKEASKKKTDYSSNILSLGKMNGLIKLSRQRILLAKSESGEGEITTIYHHPLPWPVSTKNPGESEFISEKWLFHSPDYISISQKSFLQRRLHIETKLLKTSNDINKE

SEQ ID NO: 31992 - protein, 60 aa, Homo sapiens [sequence omitted]

SEQ ID NO: 31993 - protein, 38 aa, Homo sapiens
MTKLVQSEPTQGHFPGAAGKEESLEIQQLLTARRGFER

SEQ ID NO: 31994 - protein, 7 aa, Homo sapiens
MTSTPDV

SEQ ID NO: 31995 - protein, 182 aa, Homo sapiens
MDDGKPTRAGWEGCCLAPLAPRWKRCNQNEEEKEKKCLKNHHGGSELQSEFRAAESWSAAGSARRSVRQRWERAPAPPGGRWTSESECVCARVSVGVSSRFLGMCVRGGMCWGYTRSRGNLSLTQAVGACESPPEIGREKSWRQSLEARGKEKGGGRKKRATHCTAEIHRPSQRQNLDWISS

SEQ ID NO: 31996 - protein, 230 aa, Homo sapiens [sequence omitted]

SEQ ID NO: 31997 - protein, 86 aa, Homo sapiens
MLRKARRKLIYEKLKHYHKEYRQRYRTEIRMEKMSRKAGNFYEPAESRLAFVIRIRGIDGVSPKVRNVLQLLCLCQIFNGTFVKAN

SEQ ID NO: 31998 - protein, 125 aa, Homo sapiens [sequence omitted]

SEQ ID NO: 31999 - protein, 483 aa, Homo sapiens
MGNQSSVPQDSPLGCILRNWDKFDPQALKRKRLVFLCNTVWPKYELEGQEAWPVGGSLNVNTILQLDVYCRQQRKWSEVPYVQTFMILRENPDFCKGCKIDPALLAILSRPLQRPQPGGFNDFLVNPPQPPLPETKEKEQAPPAPSSLYRTLSLHGSASTYTRPSGPRSGICLLPVVSRPVGPVQVQVPFSMQDLSQVKEGLGKFSENPGKFLEGFRKLTLTFELTWKDVAILLGQTLSLEERQTIWEAARQCGDELHLADANYPVGATAVPLQDPNWDYDTPAGICARNHMLLCLIEGMKRSQVKPVNYNKLATIDQGPHENPTAFLERLQETLIKHTNLDPGSPEGQLVLKDHFLTQAAPDIRRKLRMLALGTRAPMSEILKFASSVFYNRDQDERDRAERKEKQKEERQAQLLAALQVHQPPPGCPKDTFPGNCYQCGKPGHWKANCPYGPRGEKPCTACPLCRKLRYWKENCPESQKGP

SEQ ID NO: 32000 - protein, 52 aa, Homo sapiens
MELRCCLQEKLTTGFYFSNLIGGYAGTVSRLSIFNPVSKNFFTTITFRFLPL

SEQ ID NO: 32001 - protein, 192 aa, Homo sapiens [sequence omitted]

SEQ ID NO: 32002 - protein, 11 aa, Homo sapiens
MCDDWELIPEG

SEQ ID NO: 32003 - protein, 57 aa, Homo sapiens
MDPEVPGTSREPSSQMPAKGHLTCFESQFPDTENKGLSADLCPVCPVAPGDVSSRRG

SEQ ID NO: 32004 - protein, 96 aa, Homo sapiens
MHNDNDADGYLVRNFPTGTVIRRGHSWILSSEDVRMDRNVSVIQRGHKHPCYFLVTRKRPALGLLGFIPSEPGLAFLGCKLRAGSRSAEPRFSHLP

SEQ ID NO: 32005 - protein, 42 aa, Homo sapiens
MEQGQKIAHFYSTQLLLFHDLQEFYWDNYPNKLQAFYPNGHP

SEQ ID NO: 32006 - protein, 40 aa, Homo sapiens [sequence omitted]

SEQ ID NO: 32007 - protein, 155 aa, Homo sapiens
MKNREKFFFALTLSGSQKLLKGSLKVLVIRLRDSLIKMGEELSQAATSESQQRESSQYYQRRLEELKADMEELVQREAEASRRCMELVVKLRLREVLCPRSQGSWRRGNVRKGESQEWKEAEIRLPTLVGKKPVAVPAKSNPNLPETQRRLHSRI

SEQ ID NO: 32008 - protein, 24 aa, Homo sapiens
MEKASSLKMVMETSTAQGNTNQVP

SEQ ID NO: 32009 - protein, 46 aa, Homo sapiens
MHGNTNSPSPPGHTDCPTSNRLHLVLEQSEFGICQRKLLSGKMEDS

SEQ ID NO: 32010 - protein, 15 aa, Homo sapiens
MEDRWIEEKTESDTG

SEQ ID NO: 32011 - protein, 58 aa, Homo sapiens
MLRCPPKWIASYLVPACCRLLHLVPLGTHCAANSSRQIHWEAVAHEGISETFFCDLAV

SEQ ID NO: 32012 - protein, 57 aa, Homo sapiens
MIVRPSQPCGTITHSGGSPLACNEQSYGEAHVTVAMRVTLEVKPAAPVKPLEDCSPG

SEQ ID NO: 32013 - protein, 111 aa, Homo sapiens
MDLTCDKMCSMVKKWQTMIEAHVDVRTIDGYLLRLFCVGFTKKRNNQIQKTSYAQHQRVRQIRKKMMEIMTREVQTNALKEVVNKLIPDSIGKDIEKACQSILSMMSSLEK

SEQ ID NO: 32014 - protein, 35 aa, Homo sapiens
MIDSNLLSKGRRRPEQYIRRIQQSILRHERASGQN

SEQ ID NO: 32015 - protein, 141 aa, Homo sapiens [sequence omitted]

SEQ ID NO: 32016 - protein, 191 aa, Homo sapiens
MRYFYTTMSRPGRGEPRFISVGYVDDTQFVRFDSDDASPREEPRAPWMEREGPEYWDRNTQICKAQAQTERENLRIALRYYNQSEGGSHTMQVMYGCDVGPDGRFLRGYEQHAYDGKDYIALNEDLRSWTAADMAAQITKRKWEAARRAEQLRAYLEGEFVEWLRRYLENGKETLQRADPPQDTYDPPPHL

SEQ ID NO: 32017 - protein, 646 aa, Homo sapiens
MAPTWLSDIPLVQPPGHQDVSERRLDTQRPQVTMWERDVSSDRQEPGRRGRSWGLEGSQALSQQAEVIVRQLQELRRLEEEVRLLRETSLQQKMRLEAQAMELEALARAEKAGRAEAEGLRAALAGAEVVRKNLEEGSQRELEEVQRLHQEQLSSLTQAHEEALSSLTSKAEGLEKSLSSLETRRAGEAKELAEAQREAELLRKQLSKTQEDLEAQVTLVENLRKYVGEQVPSEVHSQTWELERQKLLETMQHLQEDRDSLHATAELLQVRVQSLTHILALQEEELTRKVQPSDSLEPEFTRKCQSLLNRWREKVFALMVQLKAQELEHSDSVKQLKGQVASLQEKVTSQSQEQAILQRSLQDKAAEVEVERMGAKGLQLELSRAQEARRRWQQQTASAEEQLRLVVNAVSSSQIWLETTMAKVEGAAAQLPSLNNRLSYAVRKVHTIRGLIARKLALAQLRQESCPLPPPVTDVSLELQQLREERNRLDAELQLSARLIQQEVGRAREQGEAERQQLSKVAQQLEQELQQTQESLASLGLQLEVARQGQQESTEEAASLRQELTQQQELYGQGVEREMGASLGGWGGNCESKLLLICPVCTFTPALQEKVAEVETRLREQLSDTERRLNEARREHAKAGEPCQGG

SEQ ID NO: 32018 - protein, 115 aa, Homo sapiens
MTKKRRNNVRAKKGRGHVQPIRCTNCARCVPKDNAIKKFVIRNIVEAAAVRDISEASVFDAYVLPKLCVKLHYCVSCVIHSKVVRNRSREARKDRTPPPRFRPAGAAARPPPKPM

SEQ ID NO: 32019 - protein, 334 aa, Homo sapiens
MFPIEAGAINPENRIIPHLPAPKWFDGQRAAENHQGTLTEYCSTLMSLPTKISRCPHLLDFFKVRPDDLKLPTDNQTKKPETYLMPKDGKSTATDITGPIILQTYRAIADYEKTSGSEMALSTGDVVEVVEKSESGWWFCQMKAKRGWIPASFLEPLDSPDETEDPEPNYAGEPYVAIKAYTAVEGDEVSLLEGEAVEVIHKLLDGWWVIRKDDVTGYFPSMYLQKSGQDVSQAQRQIKRGAPPRRSSIRNAHSIHQRSRKRLSQDAYRRNSVRFLQQRRRQARPGPQSPGSPLEEERQTQRSKPQPAVPPRPSADLILNRCSESTKRKLASAV

SEQ ID NO: 32020 - protein, 224 aa, Homo sapiens
MSSLRPQNYLFGCELKADKDCHFKVDNDENERQLSLRTVSLGAGAKDELHIVEAEAMNYEGSPIKVTLATLKMSVQPTVSLGGFETTPPVVLRLKCGSGPVHISGQHLVAVEEDAESEDEEEEDVKLLSISGKRSALGGSSKLPQKKVKLAADEDDDDDEEDDDDEDDDDDFNEEAEEKVPVKQSIQDTPAKNAQKSNQNGKDSKPSTPRSKGQESFKKQEKNS

SEQ ID NO: 32021 - protein, 225 aa, Homo sapiens [sequence omitted]

SEQ ID NO: 32022 - protein, 74 aa, Homo sapiens
MSQDYCNWKSVLLCCCIPCLILKPETRKAVACLFTSCVLFKKYLLSQDNTNKVDLRIGVPGLEPCWYHLLTACF

SEQ ID NO: 32023 - protein, 68 aa, Homo sapiens
MSQDYCNWKSVLLCCCIPCLILKPETRKAVACLFTSCVLFKKYLLSQASGIFLDICSSCFLTACFFSE

SEQ ID NO: 32024 - protein, 56 aa, Homo sapiens
MNITLWRTETQKGRFRMCDLYKIKPVSPDPNTFFEHLFLHLSKNFLLSWSSSEKSS

SEQ ID NO: 32025 - protein, 25 aa, Homo sapiens
MSYILEDHSCLQCRKPTIKGKQKCS

SEQ ID NO: 32026 - protein, 21 aa, Homo sapiens
MLDHSCLQCRKPTIKGKQKCS

SEQ ID NO: 32027 - protein, 43 aa, Homo sapiens [sequence omitted]

SEQ ID NO: 32028 - protein, 313 aa, Homo sapiens
MLISVTGLKGVEAQNGSESEVFVENYETLVFYWPSLLCLAFLLGRFLHMFVKALRVHLGWELQVEEKSVLEVHQGEHVKQLLRIPRPQEKKKSWFQTRIYEWDPCFQFPSRMIGTIVLAFICLYLFIVIEFCVFVYVRDELDVLENNLESYITFTNHSGVLTPVILQVKELISVTKGVWVATILPAYLTCVSYLFHILVCYRKHMKRLWAGDKHFLPLKFHNPASSESMVAIARYSGWQIAYILWGYLIIHMVQSLCGMAIMYSLVLPIVQTRAWKCCKGWALGCKCWAGILSLTCSESWGPPNCYVDPWSWP

SEQ ID NO: 32029 - protein, 142 aa, Homo sapiens
MARTRWTARKSTGGIAPRKQLATKATCKSAPSTGGVKKPHRYRPGTVALREIRHYQKSTELLIRKLPFQRLVREIAQDFKTDLRFQRAAIGTLQEASEAYLVGLFEDTNLCAIHATRVTIMPKDIQLARHIRGERVSEYTMM

SEQ ID NO: 32030 - protein, 480 aa, Homo sapiens [sequence omitted]

SEQ ID NO: 32031 - protein, 19 aa, Homo sapiens
RALRDGENYKKNHGFHMDR

SEQ ID NO: 32032 - protein, 125 aa, Homo sapiens
LHSEFDEQHGKKVPTVSRPYSFIEFDTFIQKTKKLYIDSCARRNLGSINTELQDVQRIMVANIEEVLQRGEALSALDSKANNLSSLSKKYRQDAKYLNMHSTYAKLAAVAVFFIMLIVYVRFWWL

SEQ ID NO: 32033 - protein, 86 aa, Homo sapiens
IRSIQLPDLTSTGCTPLSSLRPRSAAFAPRYTRLVMRRSSRSFRLQCTGFPSSSAQSISAHLSNSMPSSLLTISRCPGMFAVRCPL

SEQ ID NO: 32034 - protein, 113 aa, Homo sapiens
LLCKKKDGTKKGRVNGAQTYGLKACALPICCLAPSETRAKICPGLECFPEWLELEPGTRSSLIEVQFMCLWVWMAQSVSGLRKADLAPTLTLTDPGIYSRNWKPSATGAWRSS

SEQ ID NO: 32035 - protein, 118 aa, Homo sapiens
LRLSSRTKQVVSLQFPTWQGGLIDMDKKSTHRNPEDARAGKYEGKHKRKKRRKQNQNQHRSRHRSVTSFSSDDPMFPSSSSSSSGSQTDSSIEDAAKGKIKKKRREKTNKWEKRKDKI

SEQ ID NO: 32036 - protein, 138 aa, Homo sapiens
KGMHIRKAMKYLKDVTLQKQCVPFRRYNGGAGRCAQAKQWGWTQGQWPKKSAEFLLHMLKNAESNAELKGLNVDSLVIEHIQVNKAPKMCRWTYRAHGWINPSMSSPCHIEMILTEKEQIVPKPEEEVAQKKMISQRN

SEQ ID NO: 32037 - protein, 66 aa, Homo sapiens
KVPEEKVSSFVYPVGRLGKHTSFAQGLGPNFKRRTPRSCTRYPIECFLLPGRVRKLCVSGDHGYHS

SEQ ID NO: 32038 - protein, 17 aa, Homo sapiens
LGGSVGGRRGMPVGLFH

SEQ ID NO: 32039 - protein, 346 aa, Homo sapiens
LDGAEYRTIQANCTGTGIGYNIIWVPMASCDFSIRTYTYADTPDDFQLHNFSLPEEDTKLKIPLIHRALQLAQRPVSLLASPWTSPTRLKTRGAGNGKGPLKGQPRDIYHQTWARYIVKFLDAYAEHKLQFWAVTAENEPSAGLLSGYPFQCLGFTPEHQRDFIARDLGPTLANGTHHNVRLLMLDDQRLLLPHWAKVVLTDPEAAKGLCGFQVLGAECAARLLGSRDAVQPQHHHKPPVPCGRLDRLEPIIVDITKHTFYKQPMFYHLGHFSKFIPEGSQRVGLVASQKNDPDAVALMHPDGSAVVVVLNRSSKDVPLTIKDPAVGFLETISPGYSIHTYLWRRQ

SEQ ID NO: 32040 - protein, 5 aa, Homo sapiens
LERAS

SEQ ID NO: 32041 - protein, 14 aa, Homo sapiens
LESSSGEQQLGGFI

SEQ ID NO: 32042 - protein, 77 aa, Homo sapiens
LKACEGGGVEIAAASFPRIYLMGMCSRQDRIQKDIDVVIQKSRAEDCLFADTVQDNLLFIFSVNFKDDWDFLPPLPP

SEQ ID NO: 32043 - protein, 8 aa, Homo sapiens
MKAETSGA

SEQ ID NO: 32044 - protein, 5 aa, Homo sapiens
LCLED

SEQ ID NO: 32045 - protein, 40 aa, Homo sapiens
MRKLEKEDGGRAHQKGIKREKRGGKKTYLRSLVCSFGQKW

SEQ ID NO: 32046 - protein, 64 aa, Homo sapiens
MVRRKSMKKPRSVGEKKVEAKKQLPEQTVQKPRQECREAGPLFLQSRRETRDPETRATYLCGEG

SEQ ID NO: 32047 - protein, 17 aa, Homo sapiens
LPGKPGKGLLAVLLERL

SEQ ID NO: 32048 - protein, 69 aa, Homo sapiens
KCEILSSVLEFSSAQTISATDRICENTSMSRLGIILRHHLASPASHFKMQSVHMRRDFPLSPSSVISLP

SEQ ID NO: 32049 - protein, 562 aa, Homo sapiens
LRVGARDVIVGAQPAAPCPSPPGPEYRPPTKEEPEVSVPAAMLPRRPLAWPAWLLRGAPGAAGSWGRPVGPLARRGCCSAPGTPEVPLTRERYPVRRLPFSTVSKQDLAAFERIVPGGVVTDPEALQAPNVDWLRTLRGCSKVLLRPRTSEEVSHILRHCHERNLAVNPQGGNTGMVGGSVPVFDEIILSTARMNRVLSFHSVSGILVCQAGCVLEELSRYVEERDFIMPLDLGAKGSCHIGGNVATNAGGLRFLRYGSLHGTVLGLEVVLADGTVLDCLTSLRKDNTGYDLKQLFIGSEGTLGIITTVSILCPPKPRAVNVAFLGCPGFAEVLQTFSTCKGMLGEILSAFEFMDAVCMQLVGRHLHLASPVQESPFYVLIETSGSNAGHDAEKLGHFLEHALGSGLVTDGTMATDQRKVKMLWALRERITEALSRDGYVYKYDLSLPVERLYDIVTDLRARLGPHAKHVVGYGHLGDGNLHLNVTAEAFSPSLLAALEPHVYEWTAGQQGSVSAEHGVGFRKRDVLGYSKPPGALQLMQQLKALLDPKGILNPYKTLPSQA

SEQ ID NO: 32050 - protein, 71 aa, Homo sapiens
RLRQAVPEPVPVFRSSQHSSWEGGATSLSLTSKVDQQRLQSPASFPTLMNCILKRTLSDWLCRLPVLEQDG

SEQ ID NO: 32051 - protein, 689 aa, Homo sapiens
IRANDNKSMADVLGDGGNSSLTISEGPIVSERRLNQEVALNLKEDHEVEVGVLKESVDLPEEKLPISDSPPDTQEIHVIEQEKLEAQDSGEEARNLSFNELYPSGTLKLQYNFDTIDQQFCDLADNKDTAECDIAEVDGELFVAPSNFTLILEGEEGEVEPGDFASSDVLPKAANTATEEKLVCSGKNDNHGQVANLPSAVTSDQKSQKVETLPYVPEPIKVAIAENLLDVIKDTRSKEITSDTMEQSIHETIPLVSQNIMCPTKLVKSAFKTAQETSTMTMNVSQVDDVVSSKTRTRGQRIQNVNVKSAQQEASADVATPKMPGQSVKKKTRKAKEISEASENIYSDVRGLSQNQQIPQNSVTPRRGRRKKEVNQDILENTSSVEQELQITTGRESKRLKSSQLLEPAVEETTKKEVKVSSVTKRTPRTIKRSVENQESVEIINDLKVSTVTSPSRMIRKLRSAHLDASENTGNKQEDKSSDKQLPIKHIRRVRGREVSPSDVRENSNLESSQLTLQAEFDMSAIPRKRGRPRKINPSEDVGSKAVKEERSPKKKEAPSIKRRSTRNTPAKSENVDVGKPALGKSILVPNEELSMVMSSKKKLTKKTESQSQKRSLHSVSEERTDEMTHKETNEQEERLLATASFTKSSRSTRTQSSKAILLPDLSEPNNEPLFSPAAEVPRKQKLKK

SEQ ID NO: 32052 - protein, 237 aa, Homo sapiens
RAHWSSRERGLSRGRGAGGMALVPYEETTEFGLQKFHKPLATFSFANHTIQIRQDWRHLGVAAVVWDAAIVLSTYLEMGAVELRGRSAVELGAGTGLVGIVAALLGAHVTITDRKVALEFLKSNVQANLPPHIQTKTVVKELTWGQNLGSFSPGEFDLILGADIIYLEETFTDLLQTLEHLCSNHSVILLACRIRYERDNNFLAMLERQFTVRKVHYDPEKDVHIYEAQKRNQKEDL

SEQ ID NO: 32053 - protein, 87 aa, Homo sapiens
LAEGNRRAARRRRRQVARSRAGAGPGHGRLGAAVRVVAALLRAEGPGLPAAVAEGLCRCLQEEHLTVLSGATKARGGRCRGPAATTG

SEQ ID NO: 32054 - protein, 37 aa, Homo sapiens
KCLCSGGNVMDNTEPSQKPLWPPPGRPGCRGPLPGQP

SEQ ID NO: 32055 - protein, 4 aa, Homo sapiens
MLLL

SEQ ID NO: 32056 - protein, 10 aa, Homo sapiens
IEEKTESDTG

SEQ ID NO: 32057 - protein, 773 aa, Homo sapiens
KGGDKKESSKSLVRQGSFTIEKPSPNIPIELIPHINKQTSSTPSSLALTSASRIRERSESLDPDSSMDTTLILKDTEAVMAFLEAKLREDNKTDEGPDTPSYKRDNSISPESDVDTASTISLVTGETERKSTQKRKSFTSLYKDRCSTGSPSKDVTKSSSSGAREKMEKKTKSRSTDVGSRADGHKFVQSSGRIRQPSVDLTDDDQTSSVPHSAISDIMSSDQETYSCKPHGRTPLTSADEHVHSKLEGSKVTKSKTSPVVSGSSSKSTTLPRPRPTRTSLLRRARRGEASDSELADADKASVASEVSTTSSTSKPPTGRRNISRIDLLAQPRRTRLGSLSARSDSEATISRSSASSRTAEAIIRSGARLVPSDKFSPRIRANSISRLSDSKVKSMTSAHGSASVNSRWRRFPTGYASTSEDEFGSDHNSPKHTRLCTSPALKTTRLQSAGSAMPTSSSFKHRIKEQEDYIRDWTAHREEIARISQDLALIAREINDVAGEIDSVTSSGTAPSTTVSTAATTPGSAIDTREEVGDLHGEMHKLVDRVFDESLNFQKIPPLVHSKTPEGNNGRSGDPRPQAAEPPDHLTITRRRTWSRDEVMGDNLLLSSVFQFSKKIRQSIDKTAGKIRILFKDKDRNWDDIESKLRAESEVPIVKTSSMEISSILQELKRVEKQLQAINAMIDPDGTLEALNNMGFPSAMLPSPPKQKSSPVNNHHSPGQTPTLGQPEARALHPAAVSAAAEFENAESEADFSIHFNRVNPDGEEEDVTVHK

SEQ ID NO: 32058 - protein, 60 aa, Homo sapiens
KVLRWCVAGRNPQFQIQTVGARSASGRRRLAVATGCGRLDSGDCVWLHMLRFPLPVVLGL

SEQ ID NO: 32059 - protein, 267 aa, Homo sapiens
IPPAGAETPGRGSCRNYLPSSSPPPPEPSSFPSPPTSRGGPGSRDTMSDSEEESQDRQLKIVVLGDGASGKTSLTTCFAQETFGKQYKQTIGLDFFLRRITLPGNLNVTLQIWDIGGQTIGGKMLDKYIYGAQGVLLVYDITNYQSFENLEDWYTVVKKVSEESETQPLVALVGNKIDLEHMRTIKPEKHLRFCQENGFSSHFVSAKTGDSVFLCFQKVAAEILGIKLNKAEIEQSQRVVKADIVNYNQEPMSRTVNPPRSSMCAVQ

SEQ ID NO: 32060 - protein, 40 aa, Homo sapiens
LLSGLGSSGRGVREDQRTTSPRKLPTTSKLRGEFVTERPR

SEQ ID NO: 32061 - protein, 49 aa, Homo sapiens
LPFSLPVKQVLYPRYTIKWTKQIAESLFVAHKGTSKMTKRSGRRQRESM

SEQ ID NO: 32062 - protein, 15 aa, Homo sapiens
IPKPLLSSLGPAERL

SEQ ID NO: 32063 - protein, 53 aa, Homo sapiens
KLLLMRVFLRLFFVTLLYDWCNEESPGGEMILNYPVGPTCHHIAILLSRKQKI

SEQ ID NO: 32064 - protein, 28 aa, Homo sapiens
KKGRRRPEQYIRRIQQSILRHERASGQN

SEQ ID NO: 32065 - protein, 72 aa, Homo sapiens
LRPPAQPPRFPSASPCQSNLVPNAAAEVFRDTFASPLEEPVTKRDVLSGVPSEQRNRSKDPHSREHPAPYPE

SEQ ID NO: 32066 - protein, 12 aa, Homo sapiens
MEYSESSLQHLI

SEQ ID NO: 32067 - protein, 113 aa, Homo sapiens
LKTLQSALIPSALSPHPEKYMEFDLNGNGDIDIMSLKRMLEKLGVPKTHLELKKLIGEVSSGSGETFSYPDFLRMMLGKRSAILKMILMYEEKAREKEKPTGPPAKKAISELP

SEQ ID NO: 32068 - protein, 4 aa, Homo sapiens
LGGW

SEQ ID NO: 32069 - protein, 13 aa, Homo sapiens
KMVAQAELRALIL

SEQ ID NO: 32070 - protein, 45 aa, Homo sapiens
KAFRRRCFKMGSLDPVLKLSCSKAALCAIRINEGEGFCVEKRLGV

SEQ ID NO: 32071 - protein, 9 aa, Homo sapiens
VNSVLSVDE

SEQ ID NO: 32072 - protein, 324 aa, Homo sapiens
KNKKGKTISLTDFLAEDGGTGGGSTYVSKPVSWADETDDLEGDVSTTWHSNDDDVYRAPPIDRSILPTAPRAAREPNIDRSRLPKSPPYTAFLGNLPYDVTEESIKEFFRGLNISAVRLPREPSNPERLKGFGYAEFEDLDSLLSALSLNEESLSNRRIRVDVADQALDKDRDDPPFGRDRNRDSDKTDTDWRARPATDTFDDYPPRRGDDSFGDKYRDRYDSDRYRDGYRDGPRRDMDRYGGRDRYDDRGSRDYDRGYDSRIGSGRRAFGSGYRRDDDYREGRDCYEDQYDRRDDRSWSSRDDYSRDDYRRDDRGPPPPKDPN

SEQ ID NO: 32073 - protein, 8 aa, Homo sapiens
LYSVLRTS

SEQ ID NO: 32074 - protein, 366 aa, Homo sapiens
MYMFLVKWQDLSEKVVYRRFTEIYEFHKTLKEMFPIEAGAINPENRIIPHLPAPKWFDGQRAAENHQGTLTEYCSTLMSLPTKISRCPHLLDFFKVRPDDLKLPTDNQTKKPETYLMPKDGKSTATDITGPIILQTYRAIADYEKTSGSEMALSTGDVVEVVEKSESGWWFCQMKAKRGWIPASFLEPLDSPDETEDPEPNYAGEPYVAIKAYTAVEGDEVSLLEGEAVEVIHKLLDGWWVIRKDDVTGYFPSMYLQKSGQDVSQAQRQIKRGAPPRRSSIRNAHSIHQRSRKRLSQDAYRRNSVRFLQQRRRQARPGPQSPGSPLEEERQTQRSKPQPAVPPRPSADLILNRCSESTKRKLASAV

SEQ ID NO: 32075 - protein, 109 aa, Homo sapiens
RGTEEEGGLSPGERGEGSARDRVMQVQTGRSLPALQPPAAPRQAKGGRAGVGREREAARLERAVRPTPAASRAPALTLRGPAHCEPGRAPRWQRLRAVLGRRWREPCAA

SEQ ID NO: 32076 - protein, 154 aa, Homo sapiens
VAAEHMGPRAGRARGGRDEEGRRRAASKDVPRDPRHLPVDFLAERMLAVPVTCGDTARSALQPDLLARRRLKRCPSRWLCLSAAWSFVQVFSEPDGFTVIFSGLGNNAGGTMHWNDTRPAHFRILKVVLREAVAECLMDSYSLDVHGGRRTAAG

SEQ ID NO: 32077 - protein, 107 aa, Homo sapiens
KGDPERIGGFASGPALPLIPQPAVRNPCRIHETLPIAAGGHFALELTTPEQGRDSPDAGRLFCPFGDTSPPLPGPASLKGSPCSCLDAGFFSGSGKPAASRDDAPQR

SEQ ID NO: 32078 - protein, 64 aa, Homo sapiens
MVLPHEFSWSRGIPPNPGSPQELQKGSAGGRGPCCTCSLGTGEALIADRGCCHLCLLPAESHKP

SEQ ID NO: 32079 - protein, 19 aa, Homo sapiens
VATFGESDYHGRHRTLPCH

SEQ ID NO: 32080 - protein, 12 aa, Homo sapiens
LCKMCALNSVQD

SEQ ID NO: 32081 - protein, 43 aa, Homo sapiens [sequence omitted]

SEQ ID NO: 32082 - protein, 100 aa, Homo sapiens
VAGGPPDFSSRPVLERLTGPRPAASLSLALRGLGDWAAGLRVRGGGRLRPGASWPREPRDGGPGRGGGAAGVSLGGEGAAGPARFPARKLREAWTSAHWR

SEQ ID NO: 32083 - protein, 29 aa, Homo sapiens
VGTAEFELRGEGKVFLRCGGEREADAGKP

SEQ ID NO: 32084 - protein, 83 aa, Homo sapiens
VGTLTGLFGTPRKDLRPEPSSFLPCLPPRTGQLQEALGGGPGLWLCPPPKGRTGWDQVSLSSLTQHLPGPERTPGALKACPAA

SEQ ID NO: 32085 - protein, 14 aa, Homo sapiens
KKRRKTLEPRQRGA

SEQ ID NO: 32086 - protein, 5 aa, Homo sapiens
LAVAV

SEQ ID NO: 32087 - protein, 370 aa, Homo sapiens
IRDTDSAQEFQKQLTKAKRIMILGNGGIALELVYEIEGCEVIWAIKDKAIGNTFFDAGAAEFLTSKLIAEKSEAKIAYKRTRYTTEGRKKEARSKSKSDNVGSALGPDWHEGLNLKGTKEFSHKIHLEAMCEVKKIYLQDEFRILKKKSFTFPRDHTSVTTNTEMWPVYVELTNEKIYGCDFIVSATGVTPNIEPFLHGNSFDLGEDGGLKVDDHMHTSLPDIYAAGDICTTSWQLSPVWQQMRLWTQARQMGWYAAKCMAAASSGDSIDMDFSFELFAHVTKFFNYKVVLLGKYNAQGLGSDHELMLRCTKGQEYIKVVMQNGRMMGAFLIGETDLEETFENLILNQMNLSSYGEDLLDPNIDIEDYFD

SEQ ID NO: 32088 - protein, 11 aa, Homo sapiens
TLEPKRALLLQ

SEQ ID NO: 32089 - protein, 6 aa, Homo sapiens
LEDIRR

SEQ ID NO: 32090 - protein, 13 aa, Homo sapiens
LESEQGGMVSKNN

SEQ ID NO: 32091 - skipped

SEQ ID NO: 32092 - protein, 79 aa, Homo sapiens
VLARITPSEVTPEGGLEGESNERERERKEGREGGRMEGCMDLDVWVPFLLPWQKLTHPSVSIQNGISSWAPSPESPASR

SEQ ID NO: 32093 - protein, 89 aa, Homo sapiens
RENQMKERGRERKEEKEGEWKDVWIWMYGFHSFYPGKSLLILQCPSKMASLLGHHLQSLLQAGSYIPQNNHPSDHASVWGNEDQPRNLR

SEQ ID NO: 32094 - protein, 19 aa, Homo sapiens
LNIPGENSDVDLIKFNGHI

SEQ ID NO: 32095 - protein, 247 aa, Homo sapiens
IKEDTEEYNLRDYFEKCSKIETIEVMEDRQSGKKRGFAFVTFDDHDIIDKIVVQKYHTINGHNCEVKKALSKQEMQSAGSQRGHGGGSGNFMGRGGNFGGAGGNFGLGGNFGGRGGYGGGGGGSRGSYGRGDGGYNRFGRDGGNYGGGPGYSSRGGYGGGGTGYGNQGGGYGGGGGGYDGYNEGGNFGGGNYGGGGNYNDFGNHSGQQQSNYGPMKGGSFGGRSSGSPYGGGYGSGGGSGGYGSRRF

SEQ ID NO: 32096 - protein, 119 aa, Homo sapiens
ICFFENLEEKKEVIFQVPFSLLPLAKDRSCSGINFDIIFQTSFMWLPFSLFKMRARRGNITPALNPVPGGQHLICCKPLFLSPLPTLPPLTLLLTLLEPCLPGGPISSGRPCLWATWSV

SEQ ID NO: 32097 - protein, 52 aa, Homo sapiens
VLRRQEREPGRSRWRRLGIAVPVLHSEKTQPQPAMCEVPSTHSARLLLTLKC

SEQ ID NO: 32098 - protein, 13 aa, Homo sapiens
RKLEKMDRSGKWS

SEQ ID NO: 32099 - protein, 52 aa, Homo sapiens
LDLFIIGLQPITVSFCPQKRRQQPLPNVESKKCEPRNSETDLNYLPRLRTRA

SEQ ID NO: 32100 - protein, 71 aa, Homo sapiens
MTVFRRGQVIFGVKWRESTGFFEGEEKKQCQHDCLGTADLMMCPQGYSLSFCVICTGENIPLSHANTPSKV

SEQ ID NO: 32101 - protein, 37 aa, Homo sapiens
LAEIHPKAGLQSLQFIMELLYWLLEGGDSEDKEVKPV

SEQ ID NO: 32102 - protein, 67 aa, Homo sapiens
VAATSGSVFLKGNAEAPGVTVGEGDPEPRRPPGEATDPLSRSRRALGGPSPPPPPEEEGGEMEARGG

SEQ ID NO: 32103 - protein, 125 aa, Homo sapiens
IAVRRSESLPIVQSSRKKRSQSPTLSALMEVSSFGAGSPGSTHQGSLASRVLPIKGSHVEFGMWKGGRSHPFLPCSSRRAGSGGQLDSILPHQSPAWGPWGCKDLSSGVPSFLTSSILWKSAVVK

SEQ ID NO: 32104 - protein, 52 aa, Homo sapiens
KTWPLQSVLSTASSLRPLVMMIKGGGCGLENSHVKTHHLKVLSVRIFMMKFL

SEQ ID NO: 32105 - protein, 46 aa, Homo sapiens
RPLVMMVQSASVSKAGKGSSSSHGVAAALNQDLDPDPKCHVFNVSK

SEQ ID NO: 32106 - protein, 24 aa, Homo sapiens
KDLHDEISVNGAVSLSFQSRKRIL

SEQ ID NO: 32107 - protein, 72 aa, Homo sapiens
KEINIFKLDVSTVLLFCLESGTRGASACAAGAAGNSGCFSLSLSFLGAHFCCFDSRAYQVRSEGGRRQCPFC

SEQ ID NO: 32108 - protein, 424 aa, Homo sapiens
RINSQREEIERQRKMLAKRKPPAMGQAPPATNEQKQWKSKTNGAENETLTLKEYHEQEEIFKLRLGHLKKEEAEIQAELERLERVRKLHIREVKRIHNEDNSQFKYHPTLNDRYLLLHLLGRGGFSEVYKAFDLTEQRYVAVKIHQLNKNWRDEKKENYHKHACREYRIHKELDHPRIVKLYDYFSLDTDSFCTVLEYCEGNDLDFYLKQHKLMSEKEARSIIMQIVNALKYLNEIKPPIIHYDLKPGNILLENGTGCGEIKITDFGLSKIMDDDSYNSVDGMELTSQGAGTYWYLPPECFVVGKEPPKISNKVDVWSVGVIFYQCLYGRKPFGHNQSQQDILQENTILKATEVQFPPKPVVTPEAKALIRRCLAYRKEDRIDVQQLACDPYLLPHIQKSVSTSSPAGAAIASTSGASNNSSSN

SEQ ID NO: 32109 - protein, 5 aa, Homo sapiens
LQTQV

SEQ ID NO: 32110 - protein, 23 aa, Homo sapiens
MSSPGDQSHLEDLQMELPLGVQL

SEQ ID NO: 32111 - protein, 56 aa, Homo sapiens
LWPLQVWQRWGMGIGVSISLCGVSQGGQWGWGWDAVCAQRGQPGLIWPRGFWMFLG

SEQ ID NO: 32112 - protein, 35 aa, Homo sapiens
IRVNLISRQLNTFFLAVLLVVCMPCFHSVCTGKRT

SEQ ID NO: 32113 - protein, 225 aa, Homo sapiens [sequence omitted]

SEQ ID NO: 32114 - protein, 259 aa, Homo sapiens
VGWELGREVPLAPVAFPLGRMAHAGRTGYDNREIVMKYIHYKLSQRGYEWDAGDVGAAPPGAAPAPGIFSSQPGHTPHPAASRDPVARTSPLQTPAAPGAAAGPALSPVPPVVHLTLRQAGDDFSRRYRRDFAEMSSQLHLTPFTARGRFATVVEELFRDGVNWGRIVAFFEFGGVMCVESVNREMSPLVDNIALWMTEYLNRHLHTWIQDNGGWDAFVELYGPSMRPLFDFSWLSLKTLLSLALVGACITLGAYLGHK

SEQ ID NO: 32115 - protein, 92 aa, Homo sapiens
KKFAQKMLRKARRKLIYEKLKHYHKEYRQRYRTEIRMEKMSRKAGNFYEPAESRLAFVIRIRGIDGVSPKVRNVLQLLCLCQIFNGTFVKAN

SEQ ID NO: 32116 - protein, 40 aa, Homo sapiens
VFTGTVVRAGFAAVRALNPPVELLSRETAGEWLGTNHGNP

SEQ ID NO: 32117 - protein, 157 aa, Homo sapiens
IVYKLVINLEEREKKQMHDFYQERGLEVPKPAVPQPVPSSKGRSKKIRESVFPIPPELDMSLLLEFIGANEGTGHFKPLEKKFVRVSGEATIGHVEKFFRRKMGLDPACQVDIICGDHLLEQYQTLREIRRAIGDAAMQDGLLVLHYGLVVSPLKIT

SEQ ID NO: 32118 - protein, 48 aa, Homo sapiens
RRLGEGGGRAGWGLLPTPAPPLSPSEDDGQRSDSRRHTTAGSNWNGSN

SEQ ID NO: 32119 - protein, 57 aa, Homo sapiens
METRLTVSGGLEGEGVGRGAQKWKKFREVSSAFKRSRRFQGESVHRSWLPWEETRSK

SEQ ID NO: 32120 - protein, 57 aa, Homo sapiens
LSPGPQWKPVPPIPGSQEWCDPPGVPPPCGGGRVLPSHWTAAPGNANETPGNWVGIG

SEQ ID NO: 32121 - protein, 54 aa, Homo sapiens
RNSARGTGAMFNNSAGSSCFVSAAFGFRSPLLQWPRWLHRSVWRAGTCTGRREP

SEQ ID NO: 32122 - protein, 61 aa, Homo sapiens
KHKKGQSEEIQKKRTRRAVKFQRAITGASLADIMAKRDQKPEVRKAQREQAIRAAKEAKKG

SEQ ID NO: 32123 - protein, 53 aa, Homo sapiens
LAWREHLRDGISARKIAERAQGELFPDRALSSWGNAAAAAGDPIDSWLSAGPS

SEQ ID NO: 32124 - protein, 152 aa, Homo sapiens [sequence omitted]

SEQ ID NO: 32125 - protein, 35 aa, Homo sapiens
TSVASLSCGLSPSPSLAVLRHRTPPHPISRNLQTS

SEQ ID NO: 32126 - protein, 22 aa, Homo sapiens
RDPEETRQEETPGPFAFKERAT

SEQ ID NO: 32127 - protein, 117 aa, Homo sapiens
IFLLCPEHIDQAPERSKEDANCAVCDSPGDLLDQFFCTTCGQHYHGMCLDTAVTPLKRAGWQCPECKVCQNCKQSGEDSKMLVCDTCDKGYHTFCLQRIMKSVPTNGWKCKYHPNIQ

SEQ ID NO: 32128 - protein, 80 aa, Homo sapiens
RDIVLDVSSTSSEDRDEENEELNKLQALQEKRINEEEEKKKEKIKLKKKKKVLSSSTEEDTSKQKKRRYQKKEKKKRVNQ

SEQ ID NO: 32129 - protein, 14 aa, Homo sapiens
VVRASFGEAVVGSM

SEQ ID NO: 32130 - protein, 18 aa, Homo sapiens
MCEILSHGPLALHFSDDS

SEQ ID NO: 32131 - protein, 42 aa, Homo sapiens
RTGPGDLGTSRTRGQEPGAQKIELLEPQRWNSPFCRDLALTY

SEQ ID NO: 32132 - protein, 174 aa, Homo sapiens
KFFHPKPVPGFQVAYVVFQKPSGVSAALALKGPLLVSTESHPVKSGIHKWISDYADSVPDPEALRVEVDTFMEAYDQKIAEEEAKAKEEEGVPDEEGWVKVTRRGRRPVLPRTEAASLRVLERERRKRSQKELLNYAWQHRESKMEHLAQLRKKFEEDKQRIELLRAQRKFRPY

SEQ ID NO: 32133 - protein, 8 aa, Homo sapiens
RTHGRPKN

SEQ ID NO: 32134 - protein, 137 aa, Homo sapiens
VPQVSSMQMGAVDLLGGGLDSLVGQSFIPSSVPATFAPSPTPAVVRSGLNDLFELSTGIGMAPGGYVAPKAVWLPAVKAKGLEISGTFTHRQGHIYMEMNFTNKALQHRMDFGIQFNWCHPQHSSGHPYTTDAKPEH

SEQ ID NO: 32135 - protein, 53 aa, Homo sapiens
MDKKSTHRNPEDARAGKYEGSQTDSSIEDAAKGKIKKKRREKTNKWEKRKDKI

SEQ ID NO: 32136 - protein, 318 aa, Homo sapiens
MIFDPTVSKKKKKKKKPFMLDEEADTQTEITQPSETKEVGPEPTEDKDLEADEEDTRKKDAAGDLDDLNFFNQKKKKKKTKKIFDIDEAEEGVKDLKIESDVQEPTEPENDLDIMLGNKKKKKKVKFPDEDEILEKDEVLEEEDSKKDDGISFSNQTGPAWAGSERDYTYEELLNRVFNIMREKNPGMVAGDIRKFVMKPPQVVRVGTKKTSFVNFTHICKLLHHQPKHLRAFLLAELGTSGSIDGNNQLVIKGRFQQKQIENVLRRYIKEYVTCHTCRLLDTILQKDMRIYFLQCETCHSRCSVASIKTSYQAVMGK

SEQ ID NO: 32137 - protein, 21 aa, Homo sapiens
MGAHFSVFSFQVYCWPKPGFD

SEQ ID NO: 32138 - protein, 28 aa, Homo sapiens
MDPGRAWARDRDQSQSRERTEPMDWGVL

SEQ ID NO: 32139 - protein, 27 aa, Homo sapiens
MKDYSRETVKTRKEIALEMRKQTLMET

SEQ ID NO: 32140 - protein, 24 aa, Homo sapiens
MKDYSRETVKTRKDRCFSVPRGFP

SEQ ID NO: 32141 - protein, 13 aa, Homo sapiens
MTKRSGRRQRESM

SEQ ID NO: 32142 - protein, 324 aa, Homo sapiens
MNPTNTVFDAKRLIGRRFDDAVVQSDMKHWPFMVVNDADRPQVQVEYKGETKSFYPEEVSSIVLTKMKEIAEAYLGKTVTSAVVTVPAYFNDSQFQVTKDAGTIAGLNVLRIINEPTVAAIVYKSSDKKVGAQRNVLIFDLGGGTFGVSILTIEDGIFEVKSTARDNHLGGEDFDNRMVNHFIAELKRKHKKDISESKRAVRCLRTACEHAKRTLSSSTQVSIEIDSLYVGIDFYTSITCAQFEELNADLFCGTLDPVEKALRDAKPDKSQIHDIVLVGGSISIPKIQKLLQDFFNGKELNKSISHDEAVAYGCPGSHPVWRQV

SEQ ID NO: 32143 - protein, 45 aa, Homo sapiens
MKVIITDVFQKLVEGCEKTTRITRHVLRCGMQHFGRKIEDVFKKT

SEQ ID NO: 32144 - protein, 456 aa, Homo sapiens [sequence omitted]

SEQ ID NO: 32145 - protein, 149 aa, Homo sapiens
LRLSSRTKQVVSLQFPRQGLTMLPRLVLNSWLQAVLPPWPPKVLGLQTWQGGLIDMDKKSTHRNPEDARAGKYEGKHKRKKRRKQNQNQHRSRHRSVTSFSSDDPMFPSSSSSSSGSQTDSSIEDAAKGKIKKKRREKTNKWEKRKDKI

SEQ ID NO: 32146 - protein, 12 aa, Homo sapiens
LVTFLSMDDLLG

SEQ ID NO: 32147 - protein, 221 aa, Homo sapiens
VDDPHSFHQSKLTNEDFRKLLMTPRAAPTSAPPSKSRHHEMPREYNEDEDPAARRRKKKSYYAKLRQQEIERERELAEKYRGRAKERRDGVNKDYEETELINTTANYRAVGPTTKADKSAAEKRRQLIQESKFLGGDMEHTHLVKGLDFALLQKVRAEIASKEKEEEELMEKPQKETKKDEDPENKIEFKTRLGRNVYRVLFKNKHISGMSCSCRAAWPMW

SEQ ID NO: 32148 - protein, 31 aa, Homo sapiens
LNRRSQRALCFFLWEYLNLVSMLITDQKYRF

SEQ ID NO: 32149 - protein, 22 aa, Homo sapiens
LDSGDCVWLHMLRFPLPVVLGL

SEQ ID NO: 32150 - protein, 163 aa, Homo sapiens
KGRTVIIEQSWGSPNVTKDGVTVAKSIDLKDKYKNIGAKLVQDVANNTNEESGDGTTTATVLAGSIAKEGFQKISKGANPVEIRRGVMLAVDAVIAELKKQSKPVTTPEEIAQVAMISANGDKEIGNIISDAMKKVGRKGVITVKDGKTLNDELEIIEGMKFD

SEQ ID NO: 32151 - protein, 39 aa, Homo sapiens
LYPRYTIKWTKQIAESLFVAHKGTSKMTKRSGRRQRESM

SEQ ID NO: 32152 - protein, 21 aa, Homo sapiens
IHWEAVAHEGISETFFCDLAV

SEQ ID NO: 32153 - protein, 55 aa, Homo sapiens
LQERIKVNGKAGNLGGGVVTIERSKSKITVTSEVPFSKRYLKYLNKKYLKNIGCA

SEQ ID NO: 32154 - protein, 41 aa, Homo sapiens
IDQKAVDSQILPKVKAISQLQGYLRSVFALTNGIYPHKLVF

SEQ ID NO: 32155 - protein, 34 aa, Homo sapiens
TVSKWKSLLSQQLLCKMPRPGIVAEHPRPAEVPP

SEQ ID NO: 32156 - protein, 95 aa, Homo sapiens
IRCTNCARCVPKDNAIKKFVIRNIVEAAAVRDISEASVFDAYVLPKLCVKLHYCVSCVIHSKVVRNRSREARKDRTPPPRFRPAGAAARPPPKPM

SEQ ID NO: 32157 - protein, 123 aa, Homo sapiens
KNKKLVKKLVKKYDAFLASESLIKQIPRILSPGLNKAGKFPSLLTQNENMVAKVDEVKSTIKFQMKKVLCLAVAVGHVKMTDDELVYNTHLAVNFLGSLLKKNWQNVRALYIKSTMGKPQRLY

SEQ ID NO: 32158 - protein, 209 aa, Homo sapiens
KADKDCHFKVDNDENERQLSLRTVSLGAGAKDELHIVEAEAMNYEGSPIKVTLATLKMSVQPTVSLGGFETTPPVVLRLKCGSGPVHISGQHLVAVEEDAESEDEEEEDVKLLSISGKRSALGGSSKLPQKKVKLAADEDDDDDEEDDDDEDDDDDFNEEAEEKVPVKQSIQDTPAKNAQKSNQNGKDSKPSTPRSKGQESFKKQEKNS

SEQ ID NO: 32159 - protein, 20 aa, Homo sapiens
LDHSCLQCRKPTIKGKQKCS

SEQ ID NO: 32160 - protein, 45 aa, Homo sapiens
LRGFQPGSFGKPGRLLTGDDTCVGCWHSCYLTREGGDFACDGLPV

SEQ ID NO: 32161 - protein, 13 aa, Homo sapiens
MGSDFNEIELQLD

SEQ ID NO: 32162 - protein, 450 aa, Homo sapiens
KKTENSKLRKVKYEETVFYGLQYILNKYLKGKVVTKEKIQEAKDVYKEHFQDDVVNEKGWNYILEKYDGHLPIEIKAVPEGFVIPRGNVLFTVENTDPECYWLTNWIETILVQSWYPITVATNSREQKKILAKYLLETSGNLDGLEYKLHDFGYRGVSSQETAGIGASAHLVNFKGTDTVAGLALNKKYYGTKDPVPGYSVPAAEHSTITAWGKDHEKDAFEHIVTQFSSVPVSVVSNSYDIYNACEKIWGEDLRHLIVSRSTQAPLIIRPDSGNPLDTVLKVLEILGKKFPVTENSKGYKLLPPYLRVIQGDGVDINTLQEIVEGMKQKMWSIENIAFGSGGGLLQKLTRDLLNCSFKCSYVVTNGLGINVFKDPVADPNKRSKKGRLSLHRTPAGNFVTLEEGKGDLEEYGQDLLHTVFKNGKVTKSYSFDEIRKNAQLNIELEAAHH

SEQ ID NO: 32163 - protein, 78 aa, Homo sapiens
RPPRKINTVAEHQEGTGTWSPDIYNLAQPPRPPLNISRLGAVRGWEQLCQPLQSDSEEDDKPCSGHTRKLTGSRMAEA

SEQ ID NO: 32164 - protein, 11 aa, Homo sapiens
RKTLEPRQRGA

SEQ ID NO: 32165 - protein, 121 aa, Homo sapiens
LGSSNWEAADLGNEEKKQKFLRLMGAGKKEHTGHLVIGDCKSTSHFQTGEEDKKINVELETQYQQSMDSKLSGRYRRHCGLGFSEVEDYDGEGDVAGDDDDDDDDSPDPESLDDSESDSEP

SEQ ID NO: 32166 - protein, 90 aa, Homo sapiens
IAPVKKLVAKGDKKKKKVLKFTLDCTHPVEDGIMDAANFEQFLQERIKVNGKAGNLGGGVVTNERSKSKITVTSKVTFSKRYLKYLTKKI

SEQ ID NO: 32167 - protein, 15 aa, Homo sapiens
LPSSLFASKTTTPKR

SEQ ID NO: 32168 - protein, 162 aa, Homo sapiens
INQTVDIPENVNITLKGHTVIVNGPRGTLRRDFNHINVELSLLGKKKKEALVDKWWGNRKELATVRTICSHVQNMIKGVTLGFRYKMRSVYAYFPIIVVIPENGSVVEIRNFLGEKYIRRVRMRPGVACSVSQAQKDELIFEGNDIELVSNSAALIQQATTV

SEQ ID NO: 32169 - protein, 139 aa, Homo sapiens
LKRGEEGNMDMKRRIHLELRNWTPSAVRELVLDNCKSNDGKIEGLTAEFVNLEFLSLINVGLISVSNLPKLPKLKKLELSENRIFGGLDMLAEKLPNLTRLNLSGNKLKDISTLEPLKKLECLKSLDLFNCEVTNMNDY

SEQ ID NO: 32170 - protein, 17 aa, Homo sapiens
LRLFWKTFWQLVKLEYN

SEQ ID NO: 32171 - protein, 63 aa, Homo sapiens
KPKMAPAKKGEKVPKGKKGKADAGKEGIALQKMKMPKQIRHRKLKVLEMPSEVCAFLITVYIW

SEQ ID NO: 32172 - protein, 86 aa, Homo sapiens
LGLSPKNVGGDIAKATGDWKGLRITVKLTIQNRQAQIEVVPSASALIIKALKEPPETERNRKTLNTVGISLLMRSSTLLDRWSTDP

SEQ ID NO: 32173 - protein, 21 aa, Homo sapiens
MTEGEGRAFEVFFPLHPGLLL

SEQ ID NO: 32174 - protein, 24 aa, Homo sapiens
VGALNQERTRKRMGRTDPHSHQEV

SEQ ID NO: 32175 - protein, 41 aa, Homo sapiens
KPLLQKIASPQSQLPQPMPKKDRADKLTPDRQHWETEAIVP

SEQ ID NO: 32176 - protein, 20 aa, Homo sapiens
RIMLYLKNTSKFSAQEIGLM

SEQ ID NO: 32177 - protein, 5 aa, Homo sapiens
VVGSM

SEQ ID NO: 32178 - protein, 139 aa, Homo sapiens
VSTESHPVKSGIHKWISDYADSVPDPEALRVEVDTFMEAYDQKIAEEEAKAKEEEGVPDEEGWVKVTRRGRRPVLPRTEAASLRVLERERRKRSQKELLNYAWQHRESKMEHLAQLRKKFEEDKQRIELLRAQRKFRPY

SEQ ID NO: 32179 - protein, 107 aa, Homo sapiens
VKKPHRYRPGTVALREIRHYQKSTELLIRKLPFQRLVREIAQDFKTDLRFQRAAIGTLQEASEAYLVGLFEDTNLCAIHATRVTIMPKDIQLARHIRGERVSEYTMM

SEQ ID NO: 32180 - protein, 29 aa, Homo sapiens
MFRLPQTGISSLSEELLHFIWEQKTAGSC

SEQ ID NO: 32181 - protein, 398 aa, Homo sapiens
MILRENPDFCKGCKIDPALLAILSRPLQRPQPGGFNDFLVNPPQPPLPETKEKEQAPPAPSSLYRTLSLHGSASTYTRPSGPRSGICLLPVVSRPVGPVQVQVPFSMQDLSQVKEGLGKFSENPGKFLEGFRKLTLTFELTWKDVAILLGQTLSLEERQTIWEAARQCGDELHLADANYPVGATAVPLQDPNWDYDTPAGICARNHMLLCLIEGMKRSQVKPVNYNKLATIDQGPHENPTAFLERLQETLIKHTNLDPGSPEGQLVLKDHFLTQAAPDIRRKLRMLALGTRAPMSEILKFASSVFYNRDQDERDRAERKEKQKEERQAQLLAALQVHQPPPGCPKDTFPGNCYQCGKPGHWKANCPYGPRGEKPCTACPLCRKLRYWKENCPESQKGP

SEQ ID NO: 32182 - protein, 24 aa, Homo sapiens
KSQRPRTHQFRTQMHHCTPAWVTE

SEQ ID NO: 32183 - protein, 99 aa, Homo sapiens [sequence omitted]

SEQ ID NO: 32184 - protein, 10 aa, Homo sapiens
KAHGHDCTPH

SEQ ID NO: 32185 - protein, 187 aa, Homo sapiens
TVSLGAGAKDELHIVEAEAMNYEGSPIKVTLATLKMSVQPTVSLGGFETTPPVVLRLKCGSGPVHISGQHLVAVEEDAESEDEEEEDVKLLSISGKRSALGGSSKLPQKKVKLAADEDDDDDEEDDDDEDDDDDFNEEAEEKVPVKQSIQDTPAKNAQKSNQNGKDSKPSTPRSKGQESFKKQEKNS

SEQ ID NO: 32186 - protein, 40 aa, Homo sapiens
LGAVRGWEQLCQPLQSDSEEDDKPCSGHTRKLTGSRMAEA

SEQ ID NO: 32187 - protein, 368 aa, Homo sapiens
IHVGQAGVQIGNVCWELYCLEHGIQPDGQMPSDKTIGGGDDSFNTFSETGAGKHVPRAVFVDLEPMVIDEVCTGTYRQLFHPEQLITGKEDAANNYARGHYTIGKEIIDLVLDRIRKLANQCTGFQGFLVFHSFGGGTGSGFTSLLIERLLVDYGKKSKLEFSNYPAPQVSTAVVEPYNSILTTHTTLEHSDCAFMVDNEAICDICCRNLNIERPTYTNLNHLISQIVSSITASLRFDGALNVDLTEFQTNLVPYSHIHFPLATYAPVISAEKAYHEQLSVAEITNASFEPANQMVKCDPRHGKYMACCLLCHGDVVPKDANAAIATIKTKRSIQFVDWCPTGFKVGINYQSPTVVPGGDLAMVQSAC

SEQ ID NO: 32188 - skipped

SEQ ID NO: 32189 - protein, 13 aa, Homo sapiens
TRTLEPKRALLLQ

SEQ ID NO: 32190 - protein, 24 aa, Homo sapiens
ICGLEPLAGEAEIFRGLLGCAKGS

SEQ ID NO: 32191 - protein, 47 aa, Homo sapiens
KENRECAKEHTDTEQTGHLCNHMEVCLILKLKKLSWKTERPSPDDIV

SEQ ID NO: 32192 - protein, 81 aa, Homo sapiens
KGDKKKKKVLKFTLDCTHPVEDGIMDAANFEQFLQERIKVNGKAGNLGGGVVTNERSKSKITVTSKVTFSKRYLKYLTKKI

SEQ ID NO: 32193 - protein, 67 aa, Homo sapiens
VVYSSVELRAPWTSQVFRVFHLELYKVQKTCLEDMTPGPLYFLQKVAYTKLNMPWKLLDMQAPVWEF

SEQ ID NO: 32194 - protein, 266 aa, Homo sapiens [sequence omitted]

SEQ ID NO: 32195 - protein, 50 aa, Homo sapiens
KKRTRRAVKFQRAITGASLADIMAKRDQKPEVRKAQREQAIRAAKEAKKG

SEQ ID NO: 32196 - protein, 254 aa, Homo sapiens
MIKSGTNVACLNFSHGTHEYHVETIKNMCTATESFAADPILYRPVALALDTKGPEIRTGLIKGSSTMEVGLKMGATLKIMLDNTYMKKCDENILWLDYKNICKVMEVGSKIYVDDGLISLQVKQKGADFLVTEVETGGSSGSKKGVNLPGAAVDLPAVSEDIQDLNFGVEQDVDMVFASFIRKASDVHEVREALGEKGKNIKTINTIENHVGVQRFDEILEASDGIMVARGNPGIEIPAEKVFLAQRMMIGRCS

SEQ ID NO: 32197 - protein, 246 aa, Homo sapiens [sequence omitted]

SEQ ID NO: 32198 - protein, 19 aa, Homo sapiens
MKSPRLLNRVNLRTDSSGT

SEQ ID NO: 32199 - protein, 115 aa, Homo sapiens [sequence omitted]

SEQ ID NO: 32200 - protein, 333 aa, Homo sapiens [sequence omitted]

SEQ ID NO: 32201 - protein, 381 aa, Homo sapiens
MAERLCECKDGQCGETFSLIPDGIMNKNTLPGVKPCESSVCGEGNVDHSSLNCYIRADTGHKPYECQEHGEKPHKCKQCVKTFSCLHSFQTHEKPHTGEKPYDCKEWEKTFDSPQTVRRYRVVHSGDGPYKCKFCGKAFDNLSLYLTHERSHTGQKPYECNECGKAFGFPSSFHRHERMHTGEKPYECKQCGKTFSCSSSIKKHERIHTGEKPYECKQCGKAFASSNSFQYHERTHTGEKPYECKQCGKAFNCSSSLRKHARIHTGEKPYICKQCGKAFRFPSSIKNHEKTHTGEKPYECQECGKAFRYSSSLRVHKRIHTGEKPYECEDCGKAFSHPTTFHRHKITHTAEKPYECQECGEAFRYPVAFRRHKITHTAEKL

SEQ ID NO: 32202 - protein, 307 aa, Homo sapiens
MLRQGDTGDWIGTFWGHKGAVWGATLNATKAATAAADFTAKVWDAVLGDELMTLAHKYIVKTVYFMQDSNYLLTKGQDKLLRMYDLNKPKARPKEISGHTSGIKKRLLWCSEDKQILSADDKTARLWDHATMTEVKSLNFNMSVSSTKYIPEGEILVITYGLSIAFHSAVSLDPITSFEAPATINSASLHPEKEFLVAGGEDFKLYKYFNHGEEFESYKGYFGPIHCVRFSRDGELYASGSEDGTLRLGQTVVGKTYGLWKCVLPEEESGELAKPKIGFPETTEEELEEIVSEDSDCIYSSTPDVKA

SEQ ID NO: 32203 - protein, 299 aa, Homo sapiens
MVVSGRRLLTALLQAQKWPFQPSRDMRLVQFWAPHLVGPHLGLETGNGRGIINLNAFDPTLPKTMTQFLEQGEATLSVARRALAAQLPVLPRSEVTFLAPVTWPDKVVCVGMNYVDHCKEQNVPVPKEPIIFSKFASSIVGPYDEVVLPPQSQEVDWEVELAVVIGKKGKHIKATDAMAHVAGFTVAHDVSARDWLTRCNGKQWLLGKTFDTFCPLGPALVTKDSVADPHNLKICCRVNGEVVQSSNTNQMVFKTEDLIAWVSQFVTFYPGDVILTGTPPPPPRCRCIQETSCLSQEGG

SEQ ID NO: 32204 - protein, 81 aa, Homo sapiens
MGDAERSLFVCCGRAVTLDLVFQPAPRFLPSWIWGAALPGAGRSNETAKKHKMNRQSNQPKTGGSSRPARRHLLLPSLEAL

SEQ ID NO: 32205 - protein, 85 aa, Homo sapiens [sequence omitted]

SEQ ID NO: 32206 - protein, 50 aa, Homo sapiens [sequence omitted]

SEQ ID NO: 32207 - protein, 159 aa, Homo sapiens [sequence omitted]

SEQ ID NO: 32208 - protein, 7 aa, Homo sapiens
MGEGFGP

SEQ ID NO: 32209 - protein, 139 aa, Homo sapiens
TRSGVGFRGARRTGCSAPSVRLRLSSRTKQVVSLQFPTWQGGLIDMDKKSTHRNPEDARAGKYEGKHKRKKRRKQNQNQHRSRHRSVTSFSSDDPMFPSSSSSSSGSQTDSSIEDAAKGKIKKKRREKTNKWEKRKDKI

SEQ ID NO: 32210 - protein, 4 aa, Homo sapiens
VSTY

SEQ ID NO: 32211 - protein, 10 aa, Homo sapiens
LPAFLRAVPR

SEQ ID NO: 32212 - protein, 8 aa, Homo sapiens
MKAETSGA

SEQ ID NO: 32213 - protein, 33 aa, Homo sapiens
TTSFGCSNSPQPLKDPCSLWIAWYLQHVSMPGR

SEQ ID NO: 32214 - protein, 168 aa, Homo sapiens
VCALVAGVVLAQYIFTLKRKTGRKTKIIEMMPEFQKSSVRIKNLTRVEEMICGLIKGGAAKLQIITDFDMTLSRFSYKGKRCPTCHNSIDNCQLITDECRKKLLQLKKKYYAIEVDPVLTVEEKYPYMVEWYTKSHGLLVQQALPKAKLKEIVAESDVMLKERYEEFL

SEQ ID NO: 32215 - protein, 55 aa, Homo sapiens
LFRRGSVDLSYGRRPRQDGVKPVVSTEDECQDVIFKMRDGTSALLSPVGRLPHLD

SEQ ID NO: 32216 - protein, 12 aa, Homo sapiens
LAKKKKRTWRQI

SEQ ID NO: 32217 - protein, 80 aa, Homo sapiens
LPSSLGKKSETPSQKKKNMAETRKLRDGATAPLLPACVRKVSLRGAPAPASGGEGGTCRGRSSEALGPLCSPAIARAALT

SEQ ID NO: 32218 - protein, 250 aa, Homo sapiens
ISLGCPCFVLWTTAQQCPALCLGLGPSCTCCLDPRPAWAWALVLPMTPPERLFLPRVCGTTLHLLLLGLLLVLLPGAQGLPGVGLTPSAAQTARQHPKMHLAHSTLKPAAHLIGDPSKQNSLLWRANTDRAFLQDGFSLSNNSLLVPTSGIYFVYSQVVFSGKAYSPKATSSPLYLAHEVQLFSSQYPFHVPLLSSQKMVYPGLQEPWLHSMYHGAAFQLTQGDQLSTHTDGIPHLVLSPSTVFFGAFAL

SEQ ID NO: 32219 - protein, 13 aa, Homo sapiens
RCFSHCPRSLPPP

SEQ ID NO: 32220 - protein, 395 aa, Homo sapiens
LEATQSWGTPSSVTSPCWALRSASYPASTMYMFLVKWQDLSEKVVYRRFTEIYEFHKTLKEMFPIEAGAINPENRIIPHLPAPKWFDGQRAAENHQGTLTEYCSTLMSLPTKISRCPHLLDFFKVRPDDLKLPTDNQTKKPETYLMPKDGKSTATDITGPIILQTYRAIADYEKTSGSEMALSTGDVVEVVEKSESGWWFCQMKAKRGWIPASFLEPLDSPDETEDPEPNYAGEPYVAIKAYTAVEGDEVSLLEGEAVEVIHKLLDGWWVIRKDDVTGYFPSMYLQKSGQDVSQAQRQIKRGAPPRRSSIRNAHSIHQRSRKRLSQDAYRRNSVRFLQQRRRQARPGPQSPGSPLEEERQTQRSKPQPAVPPRPSADLILNRCSESTKRKLASAV

SEQ ID NO: 32221 - protein, 64 aa, Homo sapiens
VAAEHMGPRAGRARGGRDEEGRRRAASKDVPRDPRHLPVDFLAERMLAVPVTCGDTARSALQIY

SEQ ID NO: 32222 - protein, 21 aa, Homo sapiens
LSHTRREGMRKTKVRRYERRY

SEQ ID NO: 32223 - protein, 9 aa, Homo sapiens
MCALNSVQD

SEQ ID NO: 32224 - protein, 31 aa, Homo sapiens
RNRSHEARKDRTPPPRFRPAGAAPRPPPKPL

SEQ ID NO: 32225 - protein, 364 aa, Homo sapiens
RGGPRSRDGAPERREPGLGVLLREEEWSRGDAAAALTMSFLGGFFGPICEIDIVLNDGETRKMAEMKTEDGKVEKHYLFYDGESVSGKVNLAFKQPGKRLEHQGIRIEFVGQIELFNDKSNTHEFVNLVKELALPGELTQSRSYDFEFMQVEKPYESYIGANVRLRYFLKVTIVRRLTDLVKEYDLIVHQLATYPDVNNSIKMEVGIEDCLHIEFEYNKSKYHLKDVIVGKIYFLLVRIKIQHMELQLIKKEITGIGPSTTTETETIAKYEIMDGAPVKGESIPIRLFLAGYDPTPTMRDVNKKFSVRYFLNLVLVDEEDRRYFKQQEIILWRKAPEKLRKQRTNFHQRFESPESQASAEQPEM

SEQ ID NO: 32226 - protein, 58 aa, Homo sapiens
LPPRTGQLQEALGGGPGLWLCPPPKGRTGWDQVSLSSLTQHLPGPERTPGALKACPAA

SEQ ID NO: 32227 - protein, 20 aa, Homo sapiens
VAGETTKRYYPKVKRSVSLT

SEQ ID NO: 32228 - protein, 41 aa, Homo sapiens
VCGVPVAKLKVALGRHRCGHIFSQQDHPPEGHLWGLPTGRE

SEQ ID NO: 32229 - protein, 79 aa, Homo sapiens
IYAHVGTEESSVVAMFSPQELTGEGMGQDPSLCKASVTVMFQVFLMTVCLYLTVLLTNNLLGSKGQHLLSKAQEEFEEN

SEQ ID NO: 32230 - protein, 279 aa, Homo sapiens
LATNPPKLSSPPPPPSFLPPPPPPFRLPSPPPPPISSFFSHYERLLMLKPSVTSAPTADMATLTVVQPLTLDRDVARAIELLEKLQESGEVPVHKLQSLKKVLQSEFCTAIREVYQYMHETITVNGCPEFRARATAKATVAAFAASEGHSHPRVVELPKTDEGLGFNVMGGKEQNSPIYISRIIPGGVAERHGGLKRGDQLLSVNGVSVEGEHHEKAVELLKAAKDSVKLVVRYTPKVLEEMEARFEKLRTARRRQQQQLLIQQQQQQQQQQTQQNHMS

SEQ ID NO: 32231 - protein, 18 aa, Homo sapiens
ISVNGAVSLSFQSRKRIL

SEQ ID NO: 32232 - protein, 131 aa, Homo sapiens
IRLQRFPAWQRGFPGGDLWLALAMRGEERRGAASRLGDVPARVGGMRSLGPPGARSLPASRAHPWGREGGRLRTPARDLRESGAQRTGSGCSLALDGKWGIGWGAADPLTWITWCVSAGLRRPTTSSPSVD

SEQ ID NO: 32233 - protein, 84 aa, Homo sapiens
REKIKPSPTTSFSPPLAAPHTARASSARHRRARRVLPSFIQQLFGKCICCSEFNQKRIPASVPGSFIVPSPLSLSWGGVKRSRG

SEQ ID NO: 32234 - protein, 76 aa, Homo sapiens
RAASVEELGSAPAGLANPKLGLEPGSQILDPELHLCQEPRGERMAVSVAMSKLCILQTLCFPKIGTQKRTDHFLQL

SEQ ID NO: 32235 - protein, 40 aa, Homo sapiens
RAGWGLLPTPAPPLSPSEDDGQRSDSRRHTTAGSNWNGSN

SEQ ID NO: 32236 - protein, 75 aa, Homo sapiens
VWPQSFAVPRRPSPSHATAPHLSKSADILIFPTLSVRSPPPLDARAPGLVGCAAPRTASHQPAPSLSCSTLICTP

SEQ ID NO: 32237 - protein, 14 aa, Homo sapiens
VGLSLRSKDSPRKS

SEQ ID NO: 32238 - protein, 28 aa, Homo sapiens
VEGARRLARGVRSPGPTSAAPQSHEEGK

SEQ ID NO: 32239 - protein, 82 aa, Homo sapiens
TGGEGRGQRARIRAFRGSRALRAPPYPRGWRAAPEAPARLAVPRLPARASYSTRALNLSVTQALSPESLASWFKRNGRKGAM

SEQ ID NO: 32240 - protein, 46 aa, Homo sapiens
MKIKRVGKHACLMSQKKRQKPVVWVEQILLRMYKPGKVVLAPHLVS

SEQ ID NO: 32241 - protein, 258 aa, Homo sapiens
MLKEMIKSGTNVACLNFSHGTHEYHVETIKNMCTATESFAADPILYRPVALALDTKGPEIRTGLIKGSSTMEVGLKMGATLKIMLDNTYMKKCDENILWLDYKNICKVMEVGSKIYVDDGLISLQVKQKGADFLVTEVETGGSSGSKKGVNLPGAAVDLPAVSEDIQDLNFGVEQDVDMVFASFIRKASDVHEVREALGEKGKNIKTINTIENHVGVQRFDEILEASDGIMVARGNPGIEIPAEKVFLAQRMMIGRCS

SEQ ID NO: 32242 - protein, 36 aa, Homo sapiens
MGQDPSLCKASVTVMFQVFLMTVCLYLTEQLVAIYH

SEQ ID NO: 32243 - protein, 26 aa, Homo sapiens
MELLYWLLEGGDSEDKEGAKFVILIH

SEQ ID NO: 32244 - protein, 24 aa, Homo sapiens
MKRCWKPRKHTSRLPCQQGAANKR

SEQ ID NO: 32245 - protein, 68 aa, Homo sapiens
MTEGEGRAFEGRRRGWRKKLDHLVTWKERYFSLSTLVFSCNVWPPFPARPPAFLVHFLENVVESEVSG

SEQ ID NO: 32246 - protein, 120 aa, Homo sapiens
MRCTCPARWLRLPPPPDQRDIPPLTPGPVPSRATPRDVVTCRVQVFLVPGTSRLTGSSEVHAEETRQDLPRLRPGRPMRFVIPSDSVGRVGTRRREGIQGAPPVHGCPPVHFLHHSRLHV

SEQ ID NO: 32247 - protein, 58 aa, Homo sapiens
MKKPRSVGEKKVEAKKQLPEQTVQKPRQECREAGPLFLQSRRETRDPETRATYLCGEG

SEQ ID NO: 32248 - protein, 38 aa, Homo sapiens
MELNCSPTLDAMASFITKNKPLGFTIETEKLVQYLYNF

SEQ ID NO: 32249 - protein, 50 aa, Homo sapiens
MEQGQKIAHFYSTQLLLFHDLQEFYWDNYPNKLQAFYPNGDLLRYFEGKR

SEQ ID NO: 32250 - protein, 53 aa, Homo sapiens
MEQGQKIAHFYSTQLLLFHDLQEFYWDNYPNKLQAFYPNGALSEMKRILNVKI

SEQ ID NO: 32251 - protein, 46 aa, Homo sapiens
MEQGQKIAHFYSTQLLLFHGQYYRRTKYIGNLTYLNKAVKKIEYGE

SEQ ID NO: 32252 - protein, 30 aa, Homo sapiens
MVRVQWMEKASSLKMVMETSTAQGNTNQVP

SEQ ID NO: 32253 - protein, 23 aa, Homo sapiens
MKKDVFASPSSMIVSFLRPRQPC

SEQ ID NO: 32254 - protein, 33 aa, Homo sapiens
MLYGVETLGRHCLGGPGGARVAFQPLPLPTEME

SEQ ID NO: 32255 - protein, 45 aa, Homo sapiens
MLKYRFPAGTMALSSVAQWSSSEDAKIHEKTSRTSGRIFNGKSLG

SEQ ID NO: 32256 - protein, 105 aa, Homo sapiens [sequence omitted]

SEQ ID NO: 32257 - protein, 16 aa, Homo sapiens
MPFPGGLQAWKILLFI

SEQ ID NO: 32258 - protein, 140 aa, Homo sapiens [sequence omitted]

SEQ ID NO: 32259 - skipped

SEQ ID NO: 32260 - protein, 164 aa, Homo sapiens [sequence omitted]

SEQ ID NO: 32261 - protein, 67 aa, Homo sapiens
IAAASFPRIYLMGMCSRQDRIQKDIDVVIQKSRAEDCLFADTVQDNLLFIFSVNFKDDWDFLPPLPP

SEQ ID NO: 32262 - protein, 51 aa, Homo sapiens
RGPRERVVINRASAGNVTGGYIHQLTEQEVLQCFFIQCLEFTGPSQAAVRI

SEQ ID NO: 32263 - protein, 53 aa, Homo sapiens
LGRAVSGPRALGGSAARSVGACSRAVWRAWRTGQPPNLQAHRLDAVDKRGESD

SEQ ID NO: 32264 - protein, 13 aa, Homo sapiens
MKAEVCAFFFFPS

SEQ ID NO: 32265 - protein, 136 aa, Homo sapiens
LSRGRGAGGMALVPYEETTEFGLQKFHKPLATFSFANHTIQIRQDWRHLGVAAVVWDAAIVLSTYLEMGAVELRGRSAVELGAGTGLVGIVAALLENTGQMQTEGYSKRKQITTLQKLQGHQRQGNKLSQTEGDYN

SEQ ID NO: 32266 - protein, 32 aa, Homo sapiens
VDSVRDRLPQDHSAPANSMQLTLTLNTLQLHS

SEQ ID NO: 32267 - protein, 24 aa, Homo sapiens
RTTSPRKLPTTSKLRGEFVTERPR

SEQ ID NO: 32268 - protein, 33 aa, Homo sapiens
LGTHCAANSSRQIHWEAVAHEGISETFFCDLAV

SEQ ID NO: 32269 - protein, 119 aa, Homo sapiens [sequence omitted]

SEQ ID NO: 32270 - protein, 17 aa, Homo sapiens
LGGWNNGAVFSGTVEQL

SEQ ID NO: 32271 - protein, 4 aa, Homo sapiens
TAAH

SEQ ID NO: 32272 - protein, 86 aa, Homo sapiens
MQVQTGRSLPALQPPAAPRQAKGGRAGVGREREAARLERAVRPTPAASRAPALTLRGPAHCEPGRAPRWQRLRAVLGRRWREPCAA

SEQ ID NO: 32273 - protein, 16 aa, Homo sapiens
MPVFVVLGVDFQEAQP

SEQ ID NO: 32274 - protein, 43 aa, Homo sapiens
RCMKVIITDVFQKLVEGCEKTTRITRHVLRYLNLINVSYVMYS

SEQ ID NO: 32275 - protein, 23 aa, Homo sapiens
VPWSRVFRTLLLRPGKSTSFRGC

SEQ ID NO: 32276 - protein, 12 aa, Homo sapiens
KLREAWTSAHWR

SEQ ID NO: 32277 - protein, 58 aa, Homo sapiens
RRMPGNRRDAVRKATGCRSWKGTPGFPPSEPGWEVTSMRLNFSWIEREARSSACQQPP

SEQ ID NO: 32278 - protein, 47 aa, Homo sapiens
LGSCRRPWGGAQDCGCAPPPKAGQDGTKLVCPVSPSTSQAQREPPGL

SEQ ID NO: 32279 - protein, 1029 aa, Homo sapiens
LDLRGKKKREGEREKEEQERSRKEEEVAKNQLPCWICLSQHLGEALGFFLKGLIFRTPHLSSLLPASSLLWWLGCFFHDFLNLDWAVLCVKPISCDLLLTEVESTASILASVKEQEAQFEKLTRALEEERRHVSAQLERVRVSPQDANPLMANGTLTRRHQNGRFVGDADLERQKFSDLKLNGPQDHSHLLYSTIPRMQEPGQIVETYTEEDPEGAMSVVSVETSDDGTTRRTETTVKKVVKTVTTRTVQPVAMGPDGLPVDASSVSNNYIQTLGRDFRKNGNGGPGPYVGQAGTATLPRNFHYPPDGYSRHYEDGYPGGSDNYGSLSRVTRIEERYRPSMEGYRAPSRQDVYGPQPQVRVGGSSVDLHRFHPEPYGLEDDQRSMGYDDLDYGMMSDYGTARRTGTPSDPRRRLRSYEDMIGEEVPSDQYYWAPLAQHERGSLASLDSLRKGGPPPPNWRQPELPEVIAMLGFRLDAVKSNAAAYLQHLCYRNDKVKTDVRKLKGIPVLVGLLDHPKKEVHLGACGALKNISFGRDQDNKIAIKNCDGVPALVRLLRKARDMDLTEVITGTLWNLSSHDSIKMEIVDHALHALTDEVIIPHSGWEREPNEDCKPRHIEWESVLTNTAGCLRNVSSERSEARRKLRECDGLVDALIFIVQAEIGQKDSDSKLVENCVCLLRNLSYQVHREIPQAERYQEAAPNVANNTGPHAASCFGAKKGKGKKPIEDPANDTVDFPKRTSPARGYELLFQPEVVRIYISLLKESKTPAILEASAGAIQNLCAGRWTYGRYIRSALRQEKALSAIADLLTNEHERVVKAASGALRNLAVDARNKELIGKHAIPNLVKNLPGGQQNSSWNFSEDTVISILNTINEVIAENLEAAKKLRETQGIEKLVLINKSGNRSEKEVRAAALVLQTIWGYKELRKPLEKEGWKKSDFQVNLNNASRSQSSHSYDDSTLPLIDRNQKSDKKPDREEIQMSNMGSNTKSLDNNYSTPNERGDHNRTLDRSGDLGDMEPLKGTTPLMQKI

SEQ ID NO: 32280 - protein, 35 aa, Homo sapiens
TLEPKRALLLQCSAHKSLLVKEWDKTHLYAKPALQ

SEQ ID NO: 32281 - protein, 21 aa, Homo sapiens
LTVICGLEPLAGEAEIFRVLR

SEQ ID NO: 32282 - protein, 24 aa, Homo sapiens
IPQNNHPSDHASVWGNEDQPRNLR

SEQ ID NO: 32283 - protein, 56 aa, Homo sapiens
LCHTSGAKLCRLGLFWDFLVYQGVLSVFCVWDISKCICQQQKKTNKNAGWMLKDKK

SEQ ID NO: 32284 - protein, 32 aa, Homo sapiens
MIKGGGCGLENSHVKTHHLKVLSVRIFMMKFL

SEQ ID NO: 32285 - protein, 41 aa, Homo sapiens
MVQSASVSKAGKGSSSSHGVAAALNQDLDPDPKCHVFNVSK

SEQ ID NO: 32286 - protein, 31 aa, Homo sapiens
IKGGGCGLENSHVKTHHLKVLSVRIFMMKFL

SEQ ID NO: 32287 - protein, 1940 aa, Homo sapiens
IKYPETTEGGRPKLGGLMDPRQGVIERTGRCQTCAGNMTECPGHFGHIELAKPVFHVGFLVKTMKVLRCVCFFCSKLLVDSNNPKIKDILAKSKGQPKKRLTHVYDLCKGKNICEGGEEMDNKFGVEQPEGDEDLTKEKGHGGCGRYQPRIRRSGLELYAEWKHVNEDSQEKKILLSPERVHEIFKRISDEECFVLGMEPRYARPEWMIVTVLPVPPLSVRPAVVMQGSARNQDDLTHKLADIVKINNQLRRNEQNGAAAHVIAEDVKLLQFHVATMVDNELPGLPRAMQKSGRPLKSLKQRLKGKEGRVRGNLMGKRVDFSARTVITPDPNLSIDQVGVPRSIAANMTFAEIVTPFNIDRLQELVRRGNSQYPGAKYIIRDNGDRIDLRFHPKPSDLHLQTGYKVERHMCDGDIVIFNRQPTLHKMSMMGHRVRILPWSTFRLNLSVTTPYNADFDGDEMNLHLPQSLETRAEIQELAMVPRMIVTPQSNRPVMGIVQDTLTAVRKFTKRDVFLERGEVMNLLMFLSTWDGKVPQPAILKPRPLWTGKQIFSLIIPGHINCIRTHSTHPDDEDSGPYKHISPGDTKVVVENGELIMGILCKKSLGTSAGSLVHISYLEMGHDITRLFYSNIQTVINNWLLIEGHTIGIGDSIADSKTYQDIQNTIKKAKQDVIEVIEKAHNNELEPTPGNTLRQTFENQVNRILNDARDKTGSSAQKSLSEYNNFKSMVVSGAKGSKINISQVIAVVGQQNVEGKRIPFGFKHRTLPHFIKDDYGPESRGFVENSYLAGLTPTEFFFHAMGGREGLIDTAVKTAETGYIQRRLIKSMESVMVKYDATVRNSINQVVQLRYGEDGLAGESVEFQNLATLKPSNKAFEKKFRFDYTNERALRRTLQEDLVKDVLSNAHIQNELEREFERMREDREVLRVIFPTGDSKVVLPCNLLRMIWNAQKIFHINPRLPSDLHPIKVVEGVKELSKKLVIVNGDDPLSRQAQENATLLFNIHLRSTLCSRRMAEEFRLSGEAFDWLLGEIESKFNQAIAHPGEMVGALAAQSLGEPATQMTLNTFHYAGVSAKNVTLGVPRLKELINISKKPKTPSLTVFLLGQSARDAERAKDILCRLEHTTLRKVTANTAIYYDPNPQSTVVAEDQEWVNVYYEMPDFDVARISPWLLRVELDRKHMTDRKLTMEQIAEKINAGFGDDLNCIFNDDNAEKLVLRIRIMNSDENKMQEEEEVVDKMDDDVFLRCIESNMLTDMTLQGIEQISKVYMHLPQTDNKKKIIITEDGEFKALQEWILETDGVSLMRVLSEKDVDPVRTTSNDIVEIFTVLGIEAVRKALERELYHVISFDGSYVNYRHLALLCDTMTCRGHLMAITRHGVNRQDTGPLMKCSFEETVDVLMEAAAHGESDPMKGVSENIMLGQLAPAGTGCFDLLLDAEKCKYGMEIPTNIPGLGAAGPTGMFFGSAPSPMGGISPAMTPWNQGATPAYGAWSPSVGSGMTPGAAGFSPSAASDASGFSPGYSPAWSPTPGSPGSPGPSSPYIPSPGGAMSPSYSPTSPAYEPRSPGGYTPQSPSYSPTSPSYSPTSPSYSPTSPNYSPTSPSYSPTSPSYSPTSPSYSPTSPSYSPTSPSYSPTSPSYSPTSPSYSPTSPSYSPTSPSYSPTSPSYSPTSPSYSPTSPSYSPTSPSYSPTSPSYSPTSPSYSPTSPNYSPTSPNYTPTSPSYSPTSPSYSPTSPNYTPTSPNYSPTSPSYSPTSPSYSPTSPSYSPSSPRYTPQSPTYTPSSPSYSPSSPSYSPTSPTSTPQPVLLTVPAPQSIPQPLPSTHLPVPNIHPPLPSTRLPVPPIHPPPQNTPQHLLLIPQPLQSTPQPLPSTHLLAPLTRPLPPSTRPPAPPTRPPPPKAQPTLPLPLVTRPPAPPTVSQARLSARMTVTRRTEGTWGAAAG

SEQ ID NO: 32288 - protein, 68 aa, Homo sapiens
IFKLDVSTVLLFCLESGTRGASACAAGAAGNSGCFSLSLSFLGAHFCCFDSRAYQVRSEGGRRQCPFC

SEQ ID NO: 32289 - protein, 55 aa, Homo sapiens
KGEKVPKGKKGKADAGKEGIALQKMKMPKQIRHRKLKVLEMPSEVCAFLITVYIW

SEQ ID NO: 32290 - protein, 25 aa, Homo sapiens
VPARVCARVNCREGENITGLLRIPD

SEQ ID NO: 32291 - protein, 27 aa, Homo sapiens
LKIDGIVALCICFGFTKRKLDRGSCCT

SEQ ID NO: 32292 - protein, 83 aa, Homo sapiens
LKNYTEGDNNVITKSTTHTACVLVYWFLCDNHRDTDHPFRHGPTAAGGFPYRDEGRLRHRLPFPSVLWSLGGHEQPREWGLAV

SEQ ID NO: 32293 - protein, 53 aa, Homo sapiens
LTVSGGLEGEGVGRGAQKWKKFREVSSAFKRSRRFQGESVHRSWLPWEETRSK

SEQ ID NO: 32294 - protein, 65 aa, Homo sapiens
VVLLLVAVRLHTLLSCPLEQPAGTEWILEEGVTTGPPRKPRADIYNLRSPDEFIVGQNQALIEPG

SEQ ID NO: 32295 - protein, 57 aa, Homo sapiens
KKRLSCGACKVSALDPRTVQGSPKTMELVIWDLGLLIFLTVNLLVVFVGTRGAENGE

SEQ ID NO: 32296 - protein, 115 aa, Homo sapiens
LLCPEHIDQAPERSKEDANCAVCDSPGDLLDQFFCTTCGQHYHGMCLDTAVTPLKRAGWQCPECKVCQNCKQSGEDSKMLVCDTCDKGYHTFCLQRIMKSVPTNGWKCKYHPNIQ

SEQ ID NO: 32297 - protein, 4 aa, Homo sapiens
LEAS

SEQ ID NO: 32298 - protein, 21 aa, Homo sapiens
LVRQALLSHFTDEELGGPVDV

SEQ ID NO: 32299 - protein, 18 aa, Homo sapiens
RPFAELRGQSRRQSRKQP

SEQ ID NO: 32300 - protein, 21 aa, Homo sapiens
LVRQALLSHFTDEELGGPVDV

SEQ ID NO: 32301 - protein, 18 aa, Homo sapiens
RPFAELRGQSRRQSRMQP

SEQ ID NO: 32302 - protein, 5 aa, Homo sapiens
LQGLG

SEQ ID NO: 32303 - protein, 19 aa, Homo sapiens
ISCCGYSINCDEYRILSPS

SEQ ID NO: 32304 - protein, 7 aa, Homo sapiens
IHSPLAH

SEQ ID NO: 32305 - protein, 34 aa, Homo sapiens
LEPKRALLLQCSAHKSLLVKEWDKTHLYAKPALQ

SEQ ID NO: 32306 - protein, 100 aa, Homo sapiens
LCSSLVTRALGKTVGSSDMRNMIPQDNENPPQQGEANQNDSVAFEDVAVNFTPDEWALLDPSQKNLYREVMQETLRNLASIEVLWKRDSLKVKVISMEKF

SEQ ID NO: 32307 - protein, 26 aa, Homo sapiens
IRSGKHIGVCISVANNRLFVGSIPKS

SEQ ID NO: 32308 - protein, 4 aa, Homo sapiens
LSCP

SEQ ID NO: 32309 - protein, 51 aa, Homo sapiens
VRMPLGVSHDCRPMCVRGVLWESMDPEVPGLSADLCPVCPVAPGDVSSRRG

SEQ ID NO: 32310 - protein, 134 aa, Homo sapiens
MDKKSTHRNPEDARAGKYEGKHKRKKRRKQNQNQHRSRHRSVTSFSSDDPMFPSSSSSSSGSQTDSSIEVTQTLCRIPRRDRNESEMLPREKLRRREERKQINGKKERTKYETPRKREGKKGGNNHICHLSKRD

SEQ ID NO: 32311 - protein, 8 aa, Homo sapiens
MAGLGARV

SEQ ID NO: 32312 - protein, 33 aa, Homo sapiens
MLLEYHVYNKSCRVEFLLDVYTFLHQSSSNPEW

SEQ ID NO: 32313 - protein, 21 aa, Homo sapiens
MHPPSLGFLTYKIFNVTYKNP

SEQ ID NO: 32314 - protein, 852 aa, Homo sapiens
MPIKKIGHRSVDSSGGTTSSALKGAIQLGITHTVGSLSTKPESDVLMQDFHMVESIFFPSEGSNLTPAHHYNAFRFKTYAPVAFRYFWELFGIRPDDYLYSLCSEPLIELCSSGASGSLFYVSSDDEFIVKTVRHKEAEFLQKLLPGYYINLNQNPRTLLPKFYGLYCVQTGGKNIRIVVMNNLLPRSVKMHIKYDLKGSTYRRRASQKEREKPLPTFKDLDFLQDIPDGLFLDADVHNALCKTLQRDCLVLQSFKIMDYSLLMSIHNIDHAQREPLSSETQYSVDTRRPAPQKALYSTAMESIQGEARRGGTMETDDHMGGIPARNSKGERLLLYIGIIDILQSYRFVKKLEHSWKALIHDGDTVSVHRPGFYAEWFQRFMCNTVFKKIPLKPSPSKKLRSGSSFSQRAGSSGNSCITYQPLVSGEHKAQVTTKAEVEPGVHLGCPDVLPQTPPLEEISEGSPTPDPSFSPLVEETLQMLTTSVDNSEYMGNGDFLPTRLQAQQDAVNTVCHSKTRSNPENNVGLITLDNDCEVLTTLTPDTGRILSKLHTVQPKGKITFCMGIHVAHLALKHRQGNNHKIRIIAFVGNPVEDNEKNLVKLAKCLKKEKVNVDIINFGEEEVNTEKLTAFVNTLNGKDGTGSHLVTVPPGPSLADALISFPILAGEGGAMMGLGASDFEFGVDPSADPELALVLRVFMEEQRQRQEEEARQAAAASAAEAGIATTGTEDSDDALLKMTISQQEFGHTGLPDLSSMTEEEKIVCAMQMSLQGAEFGLAESADIDASSAMDTSEPAKEEDDYDVMQDPEFLQSVLENLPGVDPNNEAIRNAVGSLASQATKDSKKDKKEEDKK

SEQ ID NO: 32315 - protein, 76 aa, Homo sapiens
MAGTRGLMLLGPGPVAGPRDVGTCRGRQMEIQKHKDNKKLPQGIIIVFRLQTHTTPQIYTQLKGKLRKFFKEPYSE

SEQ ID NO: 32316 - protein, 34 aa, Homo sapiens
MGIRHQRYNSGSCPSIAGHSVHPGRRSYTHVCWS

SEQ ID NO: 32317 - protein, 12 aa, Homo sapiens
MTQGELRHLKPS

SEQ ID NO: 32318 - protein, 17 aa, Homo sapiens
MMGSKITLLEAAGEKHS

SEQ ID NO: 32319 - protein, 42 aa, Homo sapiens
MVGPLFTSAVSSFSCKKSLECTKLCLPQIENVKGTEDSGEEK

SEQ ID NO: 32320 - protein, 44 aa, Homo sapiens
MRPCIWIHVHLKPPCRLVELLPFSSALQGLSHLSLGTTLPDEDT

SEQ ID NO: 32321 - protein, 54 aa, Homo sapiens
MRPCIWIHVHLKPPCRLVELLPFSSALQGLSHLSLGTTLPGRNYYCSRFEDQET

SEQ ID NO: 32322 - protein, 12 aa, Homo sapiens
MSQDIGGTQTLL

SEQ ID NO: 32323 - protein, 46 aa, Homo sapiens
MCKTCVPGKAPLSLQRSSESHGRSQQSSKCRLGKSRGLCGGETATG

SEQ ID NO: 32324 - protein, 86 aa, Homo sapiens
MRSLGPPGARSLPASRAHPWGREGGRLRTPARDLRESGAQRTGSGCSLALDGKWGIGWGAADPLTWITWCVSAGLRRPTTSSPSVD

SEQ ID NO: 32325 - protein, 376 aa, Homo sapiens
MPSASGRRPAATGRSTSSGAGAPGAGTTCPRAAVRPPGTVGTAPAWSCCRRRAISAARTMAWTAAGGRHRLHPGPPGPCPDAGPAAGARGRTRTARGPRTARPPPPRPTTTGTGAPLGAGTSRRPRPPRARSRTSARALAPPLRAGLPGPPATLAGVRTPRTGGRRCPQLPTGDTGAGTWAPAGARRTSLASSPRYDAAPGAPPPPWSAQATARGGARSGQDPRGLGRKAVELAGPRLEQRPAPPGSGGTASRRGFGPSTITQPENEGAGALEPTGLFFKPDKGFLTSPDGAGGGGFTPLPRPTSTPGAVAPTSLCSSPAPAAPPGKPVFNLSSIGTQNCETRSPNCDPRPWPRHTETPDPDCDIRLLKWSSDSRL

SEQ ID NO: 32326 - protein, 332 aa, Homo sapiens
MVDLAFSGITTYGYFLTSAYKDGKPMLRQGDTGDWIGTFWGHKGAVWGATLNATKAATAAADFTAKVWDAVLGDELMTLAHKYIVKTVYFMQDSNYLLTKGQDKLLRMYDLNKPKARPKEISGHTSGIKKRLLWCSEDKQILSADDKTARLWDHATMTEVKSLNFNMSVSSTKYIPEGEILVITYGLSIAFHSAVSLDPITSFEAPATINSASLHPEKEFLVAGGEDFKLYKYFNHGEEFESYKGYFGPIHCVRFSRDGELYASGSEDGTLRLGQTVVGKTYGLWKCVLPEEESGELAKPKIGFPETTEEELEEIVSEDSDCIYSSTPDVKA

SEQ ID NO: 32327 - protein, 28 aa, Homo sapiens
MCRRVGLPFYRPFAELRGQSRRQSRMQP

SEQ ID NO: 32328 - protein, 114 aa, Homo sapiens
MWPGLTCYPPHWVRTQRLLSGPWVPGSGVSGQALAVAPDGKLLFSGGHWDGSLRVTALPRGKLLSQLSCHLDVVTCLALDTCGIYLISGSRDTTCMVWRLLHQVCLVGSSVGPP

SEQ ID NO: 32329 - protein, 189 aa, Homo sapiens [sequence omitted]

SEQ ID NO: 32330 - protein, 35 aa, Homo sapiens
MILLLVTYSPIAYSHPPRFEIAPLGRLRRARSRAE

SEQ ID NO: 32331 - protein, 277 aa, Homo sapiens [sequence omitted]

SEQ ID NO: 32332 - protein, 127 aa, Homo sapiens
MKKAAWVIIEKYYMHLGNDFHTNKHMCKEIAIIPSKKLHNKTAGYVTHLMKQIQRGPVRGISIKLQEEVRERRDNYVPEISALDQEIIEVDPDTKEMLKLLDFGGLSNLQVTQPTVGMNFKMPRGPV

SEQ ID NO: 32333 - protein, 134 aa, Homo sapiens
MQSLNNRLASYLDRMRSLETENWKLESKIRKHLEKKGPQIRHWSHYFKTIQDLRAQNLANTVDNARIVLQTDNACLAADDFRVKYETELTMCQSVESDIHGLRKVTDDTNVTWLQLETEIEALKEELLLMKKNH

SEQ ID NO: 32334 - protein, 55 aa, Homo sapiens
MKDELARGRIASRSCAALAAAGTPCSALSLGPETSHSPHTPPPQLRFSGGRGEGR

SEQ ID NO: 32335 - protein, 1092 aa, Homo sapiens
MAQTQELVNKVKELEEKTATLSQEKNDLTIQLQAEQENLMDAEERLTWMMKTKMDLESQISDMRERLEEEEGMAASLSAAKRKLEGELSDLKRDLEGLETTLAKTEKEKQALDHKVRTLTGDLSLREDSITKLQKEKRALEELHQKTLDDLQAEEDKVNHLTKNNSKLSTQIHELEDNWEQEKKIRAEVEKARRKAESDLKMTIDNLNEMERSKLDLEEVVKKRDLEINSVNSKYEDEQSLNSTLQRKLKEHQDRIEELEEELEAERAMRAKVEKQRSDLSRDLEDLSDRLEEAGGATSAQIEQNRKREAELLKLRRELEEAALQSEATASTLRKKHVDSMAELTEHVESLQRVKSKLEKDKQVMKAEIDDLNASMETIQKSKMNAEAHVRKLEDSLSEANAKVAELERNQAEINAIRTRLQAENSELSREYEESQSRLNQILRIKTSLTSQVDDYKRQLDEESKSRSTAVVSLANTKHDLDLVKEQLEEEQGGKSELQRLVSKLNTEVTTWRTKYETDAIQRTEELEETKRKLAARLQEAEEAAETAQARAASLEKNKQRLQAEVEDLTIDLEKANAAAAALDKKQRLFDKMLAEWQQKCEELQVEVDSSQKECRMYMTESFKIKTAYEESLEHLESVKKENKTLQEEIKDLIDQLGEGGRSVHELQKLKKKLEMEKEELQVALEEAESSLEVEESKVIRIQLELAQVKADIDRRIHEKEEEFEATRKNHQRAIESLQASLEAEAKGRAEALRLKKKMETDLNEMEIQLDHANKNNSELVKTLKRLQQQIKDLQVQMDEDARQHEELRKQYNLQERRLSLLQTELEEVRSALEGSERSRKLLEQEVVEITEWHNEINIQNQSLLVVKRKLESDVQRISNEHEELISEFRLTEERAKKAMMDAARMAEELRQEQDHCMHLEKIKKNYEVTIKDLQAKMEEAEQLALKGGKRTIMKLEARIKELETELDGEQKQHVETVKTLCKNERRLKELVFQTEEDHKTNQRMQALVEKLQNKLKVYKRQIEEAEDQANQTLARYRKTVHELDDAEDRAGMAETALNKLRTRHRVAGKGITSVEIIQVSKTGTSKTLSEE

SEQ ID NO: 32336 - protein, 66 aa, Homo sapiens [sequence omitted]

SEQ ID NO: 32337 - protein, 60 aa, Homo sapiens
MNFGLLCNPSGAFTDNIDFEVALTWPALPLTRLDNTNKVDLRIGVPGLEPCWYHLLTACF

SEQ ID NO: 32338 - protein, 32 aa, Homo sapiens
MQVPTSKCKLPSFTSASVPSPLLNPTGRQEGA

SEQ ID NO: 32339 - protein, 103 aa, Homo sapiens
MGPRAGRARGGRDEEGRRRAASKDVPRDPRHLPVDFLAERMLAVPVTCGDTARSALQALQKFHAAFSFLCRSASCWTIAVCSAGSQLLRGNKSVLRSPAVTVD

SEQ ID NO: 32340 - protein, 87 aa, Homo sapiens
MGPRAGRARGGRDEEGRRRAASKDVPRDPRHLPVDFLAERMLAVPVTCGDTARSALQILLHLGFRHFQSEKIHILSALWTDLRTVLT

SEQ ID NO: 32341 - protein, 138 aa, Homo sapiens
MGVRLSRAHCHETACVSALSPAPGATSPRPSSLDWGRTGLLYPGGGRKSRKRRSVREGSLRAEAARPPPVQAARWGASQGFRSRQQEQDVNCFSSAEKEALPPPPATANVLKKTLHGNGLPYDDRNGGNIHLFYISEW

SEQ ID NO: 32342 - protein, 334 aa, Homo sapiens
MHNIIVKELIVTFFLGITVVQMLISVTGLKGVEAQNGSESEVFVENYETLVFYWPSLLCLAFLLGRFLHMFVKALRVHLGWELQVEEKSVLEVHQGEHVKQLLRIPRPQEKKKSWFQTRIYEWDPCFQFPSRMIGTIVLAFICLYLFIVIEFCVFVYVRDELDVLENNLESYITFTNHSGVLTPVILQVKELISVTKGVWVATILPAYLTCVSYLFHILVCYRKHMKRLWAGDKHFLPLKFHNPASSESMVAIARYSGWQIAYILWGYLIIHMVQSLCGMAIMYSLVLPIVQTRAWKCCKGWALGCKCWAGILSLTCSESWGPPNCYVDPWSWP

SEQ ID NO: 32343 - protein, 48 aa, Homo sapiens
KKLSLKLNGGRHVQGILRGFDPFMNLVIDECVEMATSGQQNNIGMVVI

SEQ ID NO: 32344 - protein, 26 aa, Homo sapiens
VAALKKNATLLFLSPTSGSAGVLRMH

SEQ ID NO: 32345 - protein, 12 aa, Homo sapiens
MNCILKRTLSDW

SEQ ID NO: 32346 - protein, 5 aa, Homo sapiens
MSCCW

SEQ ID NO: 32347 - protein, 312 aa, Homo sapiens
KNRAIKKAKRRNVGFESDSRGGFKSFKGLVVPSGGGRFPGFGSGAGGKPLEGLSNGNNITSAPPFTSAKAVAEPKVAFGSLAANGPTALVDKKVSNPKTNGDSQQPSSSGLASSKACVRNAYHKQLAALNCSVRDWIVKHVNTNPLCDLTPIFKDYEKYLANIEQQHGNSGRNSESESNKAAAETRSPSLVGSTKLQQESAFLFHGNKTEDTPDKKVELTSEKKTDPSSLGATSASFNFGKKVDSSVLGSLSSVPLTGFSFSPGNSSLFGKDITRVNQSLHHFALNHWRAKRKVTVVNAKVEMKKRIMSYPK

SEQ ID NO: 32348 - protein, 7 aa, Homo sapiens
KRKGVDK

SEQ ID NO: 32349 - protein, 281 aa, Homo sapiens
VLTTTAFPFVSVMSWKKALRIPGDLRVATVTLMLAMLSSLLAEGRDSPEDFVFQFKGMCYFTNGTERVRLVTRYIYNREEYARFDSDVGVYRAVTPQGRPDAEYWNSQKEVLEGTRAELDTVCRHNYEVAFRGILQRRVEPTVTISPSRTEALNHHNLLVCSVTDFYPGQIKVRWFRNDQEETAGVVSTPLIRNGDWTFQILVMLEMTPQRGDVYTCHVEHPSLQSPITVEWRAQSESAQSKMLSGVGGFVLGLIFLGLGLIIRQRSQKGPQGPPPAGLLH

SEQ ID NO: 32350 - protein, 77 aa, Homo sapiens
ILKEGDLVKIDLGVYVDGFIANVAHTFVVDVAQGTQVTGRKADVIKAAHLCAEAALRLVKPGNQNTQVTEAWNKVAQ

SEQ ID NO: 32351 - protein, 4 aa, Homo sapiens
LRTS

SEQ ID NO: 32352 - protein, 431 aa, Homo sapiens
IDLPSWTQFRQDTGTMRTVRRHLFPQHSAPGRGVVWEWLSDDGSWTAYEAGVCDDLEQQVARGNQLVDLAPLGYNYTVNYTTHTQTNKTSSFCCSVRRQAGPPYPVTTIIAPPGHTGVACSCHQCLSGSRTGPVSGRYRHSMTNLPAYPAPQHPPHRTASVFGTHQAFAPYNKPSLSGARSAPRLNTTNAWDAAPPSLGSQPLYRSSLSHLGPQHLPPGSSTSGAVSASLPSGPSSSPGSVPATVPMQMPKPSRVQQALAGMTSVLMSAIGLPVCLSRAPQPTSPPASRLASKSHGSVKRLRKMSVKGATPKPEPEPEQVIKNYTEELKVPPDEDCIICMEKLSAASGYSDVTDSKAIGPLAVGCLTKCSHAFHLLCLLAMYCNGNKDGSLQCPSCKTIYERRRGPSPRERWRYYGSRCRSPATRTAGPSS

SEQ ID NO: 32353 - protein, 27 aa, Homo sapiens
VSLTQHMAQECLPSVSVSTAAIPRCWS

SEQ ID NO: 32354 - protein, 17 aa, Homo sapiens
LLDVYTFLHQSSSNPEW

SEQ ID NO: 32355 - protein, 10 aa, Homo sapiens
RKFFKEPYSE

SEQ ID NO: 32356 - protein, 171 aa, Homo sapiens
IKKAYRKLALKWHPDKNPENKEEAERKFKQVAEAYEVLSDAKKQDIYDKYGKEGLNGGGGGGSHFDSPFEFGFTFRNPDDVFREFFGGRDPFSFDFFEDPFEDFFGNRRGPRGSRSRGTGSFFSVFSGFPSFRSGFSSFDTGFTSFGSLGHGGLTSFSSTSFGGSGMGNFK

SEQ ID NO: 32357 - protein, 7 aa, Homo sapiens
RSVCQTY

SEQ ID NO: 32358 - protein, 21 aa, Homo sapiens
LEPLAGEAEIFRGLLGCAKGS

SEQ ID NO: 32359 - protein, 50 aa, Homo sapiens
LAVKENRECAKEHTDTEQTGHLCNHMEVCLILKLKKLSWKTERPSPDDIV

SEQ ID NO: 32360 - protein, 23 aa, Homo sapiens
LNSCRPEIGAFQAPQMSHKPPRL

SEQ ID NO: 32361 - protein, 14 aa, Homo sapiens
IEYYQKGKKNDLNF

SEQ ID NO: 32362 - protein, 5 aa, Homo sapiens
MSFRE

SEQ ID NO: 32363 - protein, 30 aa, Homo sapiens
LPSWAPLPQATRRDAPAAQHRFLSGSWALL

SEQ ID NO: 32364 - protein, 11 aa, Homo sapiens
RGLCGGETATG

SEQ ID NO: 32365 - protein, 39 aa, Homo sapiens
TRPGPALPSLLPPGAPGRGGGGGRGPAGLASALRHLELR

SEQ ID NO: 32366 - protein, 30 aa, Homo sapiens
LLLTQSLFRWSSIRTCLTLGAKIWARGTPS

SEQ ID NO: 32367 - protein, 20 aa, Homo sapiens
LDHHRCRASGNSYGGGFPAI

SEQ ID NO: 32368 - protein, 645 aa, Homo sapiens
LALRERRPGRSVSASVALGPTLAFKEDTRTPGSWEMDSVAFEDVAVNFTQEEWALLGPSQKSLYRNVMQETIRNLDCIEMKWEDQNIGDQCQNAKRNLRSHTCEIKDDSQCGETFGQIPDSIVNKNTPRVNPCDSGECGEVVLGHSSLNCNIRVDTGHKSCEHQEYGEKPYTHKQRGKAISHQHSFQTHERPPTGKKPFDCKECAKTFSSLGNLRRHMAAHHGDGPYKCKLCGKAFVWPSLFHLHERTHTGEKPYECKQCSKAFPFYSSYLRHERIHTGEKAYECKQCSKAFPDYSTYLRHERTHTGEKPYKCTQCGKAFSCYYYTRLHERTHTGEQPYACKQCGKTFYHHTSFRRHMIRHTGDGPHKCKICGKGFDCPSSVRNHETTHTGEKPYECKQCGKVLSHSSSFRSHMITHTGDGPQKCKICGKAFGCPSLFQRHERTHTGEKPYQCKQCGKAFSLAGSLRRHEATHTGVKPYKCQCGKAFSDLSSFQNHETTHTGEKPYECKECGKAFSCFKYLSQHKRTHTVEKPYECKTCRKAFSHFSNLKVHERIHSGEKPYECKECGKAFSWLTCLLRHERIHTGEKPYECLQCGKAFTRSRFLRGHEKTHTGEKLYECKECGKALSSLRSLHRHKRTHWKDTL

SEQ ID NO: 32369 - protein, 36 aa, Homo sapiens
VSSGKTLAGLVGCAAPRTASHQPAPSLSCSTLICTP

SEQ ID NO: 32370 - protein, 20 aa, Homo sapiens
LQVESVGNQQVERGSRSNPF

SEQ ID NO: 32371 - protein, 64 aa, Homo sapiens [sequence omitted]

SEQ ID NO: 32372 - protein, 84 aa, Homo sapiens [sequence omitted]

SEQ ID NO: 32373 - protein, 77 aa, Homo sapiens
MSRNSGRGGSQRRPSIQPGSALCPYLHQVGSLPCIAWGLAGLGPALLWNWMFSGSPAFPHVNTVHNIVFKVQFKTQK

SEQ ID NO: 32374 - protein, 6 aa, Homo sapiens
MTVNQR

SEQ ID NO: 32375 - protein, 16 aa, Homo sapiens
MLINALVSKSQIAQMC

SEQ ID NO: 32376 - protein, 36 aa, Homo sapiens
MHSSQAPGGGWRHQTDRTKTSEGQPGGACGCRAHRI

SEQ ID NO: 32377 - protein, 41 aa, Homo sapiens
MHSSQAPGGGWRHQTDRTKTSEGQPGGACGCRAHSSLKCLG

SEQ ID NO: 32378 - protein, 261 aa, Homo sapiens
MEVSGNPRDLYDDKDGLRKEELGAISGPKEFSDFCNRLKQIKEFHRKHPNEIYVAMSVEFEELLKARENPSEEAQNSVEFTDEEGYGRYLDLHDCCLKYINLKASEKLDYITYLSILDQLFDIPKDRRNAEHKRYLEMLLEYLQDYTDRVKPLQDQNELSGKIQAEFEKKWENGIFPGWPKETSSALTQAGAHLDLSAFSSWEELASLGLDRLKSALLALGLKCGRIPEERAQRLFSTKGKSLESLDTSLFAKNPKSKGTK

SEQ ID NO: 32379 - protein, 41 aa, Homo sapiens
MSDNDHTGQLFHHLEGACQRTKATEKRAELRLGEREKFLSA

SEQ ID NO: 32380 - protein, 6 aa, Homo sapiens
MHWNMT

SEQ ID NO: 32381 - protein, 80 aa, Homo sapiens
MIFLTFYSPHSITFDPNYSRDWIKNKWMWHTGSISNHSFSPAGLMCSETNLKHSPSSSSSLDQEELLEEQHSTNLHIDLV

SEQ ID NO: 32382 - protein, 78 aa, Homo sapiens [sequence omitted]

SEQ ID NO: 32383 - protein, 346 aa, Homo sapiens
MRQTLLTYFGHTWPMVDLAFSGITTYGYFLTSAYKDGKPMLRQGDTGDWIGTFWGHKGAVWGATLNATKAATAAADFTAKVWDAVLGDELMTLAHKYIVKTVYFMQDSNYLLTKGQDKLLRMYDLNKPKARPKEISGHTSGIKKRLLWCSEDKQILSADDKTARLWDHATMTEVKSLNFNMSVSSTKYIPEGEILVITYGLSIAFHSAVSLDPITSFEAPATINSASLHPEKEFLVAGGEDFKLYKYFNHGEEFESYKGYFGPIHCVRFSRDGELYASGSEDGTLRLGQTVVGKTYGLWKCVLPEEESGELAKPKIGFPETTEEELEEIVSEDSDCIYSSTPDVKA

SEQ ID NO: 32384 - protein, 7 aa, Homo sapiens
MRTGLEA

SEQ ID NO: 32385 - protein, 61 aa, Homo sapiens
MHSSKSVRAKMGLVNQPVVVAKRFGAAKKQTVSFEQQTFSSICNMSKWEGGVAKANYHCQT

SEQ ID NO: 32386 - protein, 190 aa, Homo sapiens
MEETGKIFKKEKEMKKRIAFPTSISVNNCGCHFSPLKRGQDYILKEGDLVKIDLGVHVDGFIANVTHTFVVDVAQGTQVTGRKGDVIKAAQLCVEAALCLVKPGNQNIQVREAWSKVALSFNCMPIEGMLSHQLKQHVIDGEKNIIQNPTDQQKKDHEKAEFEVHEVYAADVLVSSGEGKAKDAGQRTTI

SEQ ID NO: 32387 - protein, 28 aa, Homo sapiens [sequence omitted]

SEQ ID NO: 32388 - protein, 15 aa, Homo sapiens
MRCLHTQRAAADAGR

SEQ ID NO: 32389 - protein, 56 aa, Homo sapiens
MHLVTNEIGLVLKTSCIHPFSHCYKDIPKTGHFMKKRGLIGSRFCRLYRKHSSFHF

SEQ ID NO: 32390 - protein, 179 aa, Homo sapiens
MGLGDKSQGEEWREEEQSPRKKGDSLDNARTPAVSSNHTHVTSAFTLHMQEEASSVEFSPPRTCSSPGEAGPMPMEQGVPVSPTERGSFPHQDTLQKSTIQIMHSLLKMLHCVLYHLRKNSRLLSNVLQSLPNWAPVRVGFFVVVVLQMLSTTPEVVSLLFVGLESPFPRSLHGCSISP

SEQ ID NO: 32391 - protein, 61 aa, Homo sapiens
MAAEGKGSRQLASSVPICFPERGEEISEDAMPEWLTLQENRRTKSEQETYRIGENFCNLLI

SEQ ID NO: 32392 - protein, 70 aa, Homo sapiens
MLRDAKKNLDRQAFLGCTRSMMPASASGDNLKKFTIGRVRWLMPVMPALREAETDGSFEVRSSRPGWPTW

SEQ ID NO: 32393 - protein, 102 aa, Homo sapiens
MAEQNWKDAEAWFTSRTEELNREVAGHTDQLQMSRSKVADLRRTLQGLELQSRLSMKAALEATLAETEARFGVQLAQIQPLINCIEAQLGDVRADSERQNQD

SEQ ID NO: 32394 - protein, 81 aa, Homo sapiens [sequence omitted]

SEQ ID NO: 32395 - protein, 182 aa, Homo sapiens
MVVDAVFAIKYTDIRGQPCYPVNSVNILKAHGKSQTESMLISGYALNCVVGSQGIPKRIVNAKIACLDFGLQKTKMKLGIQVVITDPEKLDQIRQRESDITKERIQKILVTGASIILTTGGIDDMCLKYFVEAGATAVRRVFKRDLKRIPKASGATILSTLANLKGKETFEAAVLGQAEEVV

SEQ ID NO: 32396 - protein, 260 aa, Homo sapiens [sequence omitted]

SEQ ID NO: 32397 - protein, 19 aa, Homo sapiens
MRKTEVIRRENQQQIITCS

SEQ ID NO: 32398 - protein, 61 aa, Homo sapiens
MQKSPVFCVAHAGSCRPELFLFGHLGSSECDFEERRKDVKSDWSATFMVLRKEFAFLEHSL

SEQ ID NO: 32399 - protein, 35 aa, Homo sapiens
MLNKNALPQLTYVFWLVPHNILSNGLQRNKETGEP

SEQ ID NO: 32400 - protein, 21 aa, Homo sapiens
MPKLRSEITKISYEGLRREDT

SEQ ID NO: 32401 - protein, 27 aa, Homo sapiens
MPKLRSEITKISYQTWKSCLRDQGAKR

SEQ ID NO: 32402 - skipped

SEQ ID NO: 32403 - protein, 50 aa, Homo sapiens [sequence omitted]

SEQ ID NO: 32404 - protein, 106 aa, Homo sapiens
LQFPTWQGGLIDMDKKSTHRNPEDARAGKYEGKHKRKKRRKQNQNQHRSRHRSVTSFSSDDPMFPSSSSSSSGSQTDSSIEDAAKGKIKKKRREKTNKWEKRKDKI

SEQ ID NO: 32405 - skipped

SEQ ID NO: 32406 - protein, 2695 aa, Homo sapiens
RRSLRESTCSCAARTRACGADQGFRRALYPTAPRAPERRAFTALRSSVQPLLESWGRFPGSGVSPDPGKAGTKVKIFTNKMKILLIIFVLIIWTETLADQSPGPGPVYADVVFLVDSSDHLGPKSFPFVKTFINKMINSLPIEANKYRVALAQYSDEFHSEFHLSTFKGRSPMLNHLKKNFQFIGGSLQIGKALQEAHRTYFSAPINGRDRKQFPPILVVLASAESEDEVEEASKALQKDGVKIISVGVQKASEENLKAMATSHFHFNLRTIRDLSTFSQNMTQIIKDVTKYKEGAVDADMQVHFPISCQKDSLADLVFLVDESLGTGGNLRHLQTFLENITSSMDVKENCMRLGLMSYSNSAKTISFLKSSTTQSEFQQQIKNLSIQVGKSNTGAAIDQMRRDGFSESYGSRRAQGVPQIAVLVTHRPSDDEVHDAALNLRLEDVNVFALSIQGANNTQLEEIVSYPPEQTISTLKSYADLETYSTKFLKKLQNEIWSQISTYAEQRNLDKTGCVDTKEADIHFLIDGSSSIQEKQFEQIKRFMLEVTEMFSIGPDKVRVGVVQYSDDTEVEFYITDYSNDIDLRKAIFNIKQLTGGTYTGKALDYILQIIKNGMKDRMSKVPCYLIVLTDGMSTDRVVEPAKRLRAEQITVHAVGIGAANKIELQEIAGKEERVSFGQNFDALKSIKNEVVREICAEKGCEDMKADIMFLVDSSWSIGNENFRKMKIFMKNLLTKIQIGADKTQIGVVQFSDKTKEEFQLNRYFTQQEISDAIDRMSLINEGTLTGKALNFVGQYFTHSKGARLGAKKFLILITDGVAQDDVRDPARILRGKDVTIFSVGVYNANRSQLEEISGDSSLVFHVENFDHLKALERKLIFRVCALHDCKRITLLDVVFVLDHSGSIKKQYQDHMINLTIHLVKKADVGRDRVQFGALKYSDQPNILFYLNTYSNRSAIIENLRKRRDTGGNTYTAKALKHANALFTEEHGSRIKQNVKQMLIVITDGESHDHDQLNDTALELRNKGITIFAVGVGKANQKELEGMAGNKNNTIYVDNFDKLKDVFTLVQERMCTEAPEVCHLQEADVIFLCDGSDRVSNSDFVTMTTFLSDLIDNFDIQSQRMKIGMAQFGSNYQSIIELKNSLTKTQWKTQIQNVSKSGGFPRIDFALKKVSNMFNLHAGGRRNAGVPQTLVVITSGDPRYDVADAVKTLKDLGICVLVLGIGDVYKEHLLPITGNSEKIITFQDFDKLKNVDVKKRIIREICQSCGKTNCFMDIVVGFDISTHVQGQPLFQGHPQLESYLPGILEDISSIKGVSCGAGTEAQVSLAFKVNSDQGFPAKFQIYQKAVFDSLLQVNVSGPTHLNAQFLRSLWDTFKDKSASRGQVLLIFSDGLQSESNIMLENQSDRLREAGLDALLVVSLNTTAHHEFSSFEFGKRFDYRTHLTIGMRELGKKLSQYLGNIAERTCCCTFCKCPGIPGPHGTRGLQAMKGSQGLKGSRGHRGEDGNPGVRGDTGPQGDKGIAGCPGAWGQKGLKGFSGPKGGHGDDGIDGLDGEEGCHGFPGIKGEKGDPGSQGSPGSRGAPGQYGEKGFPGDPGNPGQNNNIKGQKGSKGEQGRQGRSGQKGVQGSPSSRGSRGREGQRGLRGVSGEPGNPGPTGTLGAEGLQGPQGSQGNPGRKGEKGSQGQKGPQGSPGLMGAKGSTGRPGLLGKKGEPGLPGDLGPVGQTGQRGRQGDSGIPGYGQMGRKGVKGPRGFPGDAGQKGDIGNPGIPGGPGPKGFRGLALTVGLKGEEGSRGLPGPPGQRGIKGMAGQPVYSQCDLIRFLREHSPCWKEKCPAYPTELVFALDNSYDVTEESFNKTRDIITSIVNDLNIRENNCPVGARVAMVSYNSGTSYLIRWSDYNRKKQLLQQLSQIKYQDTTEPRDVGNAMRFVTRNVFKRTYAGANVRRVAVFFSNGQTASRSSIITATMEFSALDISPTVFAFDERVFLEAFGFDNTGTFQVIPVPPNGENQTLERLRRCALCYDKCFPNACIREAFLPEDSYMDVVFLIDNSRNIAKDEFKAVKALVSSVIDNFNIASDPLISDSGDRIALLSYSPWESSRRKMGTVKTEFDFITYDNQLLMKNHIQTSFQQLNGEATIGRALLWTTENLFPETPYLRKHKVIFVVSAGENYERKEFVKMMALRAKCQGYVIFVISLGSTRKDDMEELASYPLDQHLIQLGRIHKPDLNYIAKFLKPFLYSVRRGFNQYPPPMLEDACRLINLGGENIQNDGFQFVTELQEDFLGGNGFIGQELNSGRESPFVKTEDNGSDYLVYLPSQMFEPQKLMINYEKDQKSAEIASLTSGHENYGRKEEPDHTYEPGDVSLQEYYMDVAFLIDASQRVGSDEFKEVKAFITSVLDYFHIAPTPLTSTLGDRVAVLSYSPPGYMPNTEECPVYLEFDLVTYNSIHQMKHHLQDSQQLNGDVFIGHALQWTIDNVFVGTPNLRKNKVIFVISAGETNSLDKDVLRNVSLRAKCQGYSIFVFSFGPKHNDKELEELASHPLDHHLVQLGRTHKPDWNYIIKFVKPFVHLIRRAINKYPTEDMKATCVNMTSPNPENGGTENTVLLLPGIYEIKTENGDLFDEFDSQAQHLLVLGNNHSSGSETATDLMQKLYLLFSTEKLAMKDKEKAHLEEISALVVDKQQEKEDKEMEATDI

SEQ ID NO: 32407-32408 - skipped (2 entries)

SEQ ID NO: 32409 - protein, 52 aa, Homo sapiens
RAFTKMAKAFRRRCFKMGSLDPVLKLSCSKAALCAIRINEGEGFCVEKRLGV

SEQ ID NO: 32410 - protein, 17 aa, Homo sapiens
MDSYSLDVHGGRRTAAG

SEQ ID NO: 32411 - protein, 12 aa, Homo sapiens
LASFLTYVAVAF

SEQ ID NO: 32412 - skipped

SEQ ID NO: 32413 - protein, 9 aa, Homo sapiens
KFFKEPYSE

SEQ ID NO: 32414 - protein, 9 aa, Homo sapiens
KKTGAKPLP

SEQ ID NO: 32415 - protein, 4 aa, Homo sapiens
MKVT

SEQ ID NO: 32416 - skipped

SEQ ID NO: 32417 - protein, 56 aa, Homo sapiens
IYAHVGTEESSVVAMFSPQELTGEGMGQDPSLCKASVTVMFQHLIIYPGEFSCLPG

SEQ ID NO: 32418 - protein, 12 aa, Homo sapiens
MIQAQNPNSGTV

SEQ ID NO: 32419 - protein, 67 aa, Homo sapiens
LRDDDVGELGRQVEWGAQLWVLYAGVERPVSRMGQKQENGSHVLGLHGGPQLAAQRLLRGAQRRQEQ

SEQ ID NO: 32420 - protein, 64 aa, Homo sapiens
LEGESNERERERKEGREGGRMEGCMDLDVWVPFLLPWQKLTHPSVSIQNGISSWAPSPESPASR

SEQ ID NO: 32421 - protein, 78 aa, Homo sapiens
MRPCIWIHVHLKPPCRLVELLPFSSALQGLSHLSLGTTLPVILPERNEEQNLQELSHNADKYQMGDCCKEEIDDSIFY

SEQ ID NO: 32422 - protein, 87 aa, Homo sapiens
VLLEKNLQAAHGYAQEDRERMHRNIVSLAQNLLNFMIGSILDLWQCFLWFYIGSSLNGTRGKRVPAHFSNTSLHYLNAAWQLLSPYL

SEQ ID NO: 32423 - protein, 5 aa, Homo sapiens
LEMLK

SEQ ID NO: 32424 - protein, 11 aa, Homo sapiens
LKSPKPLPGAA

SEQ ID NO: 32425 - protein, 7 aa, Homo sapiens
MPIRQPA

SEQ ID NO: 32426 - protein, 62 aa, Homo sapiens
TKHKKGQSEEIQKKRTRRAVKFQRAITGASLADIMAKRDQKPEVRKAQREQAIRAAKEAKKG

SEQ ID NO: 32427 - skipped

SEQ ID NO: 32428 - protein, 128 aa, Homo sapiens
IHKWISDYADSVPDPEALRVEVDTFMEAYDQKIAEEEAKAKEEEGVPDEEGWVKVTRRGRRPVLPRTEAASLRVLERERRKRSQKELLNYAWQHRESKMEHLAQLRKKFEEDKQRIELLRAQRKFRPY

SEQ ID NO: 32429 - protein, 20 aa, Homo sapiens
TLLGLEKKTKMSKRDAPSVL

SEQ ID NO: 32430 - protein, 33 aa, Homo sapiens
TEPNPCLSAAAWEGSAGLTRGRSTRGGVPRGNN

SEQ ID NO: 32431 - protein, 43 aa, Homo sapiens
VWLWIAPYGQLCPQGRMRIATEVLKSKPNSSHWHTGIRQKAGS

SEQ ID NO: 32432 - protein, 16 aa, Homo sapiens
MTRTASLRLCSRPSLC

SEQ ID NO: 32433 - protein, 906 aa, Homo sapiens
LAKEKVFTMQDLLQLIKINPTSSLYKSLVSGADKENQKGFLMHFLKGLAEYHQAKESCNMETQTSSTFSRDSLAEKLQLIDDQFADAYPQRIKFESLEIKLNEYKREIEEQLREEICQKLKFFKDTEIGKIKMEAKKKYEKELAVFQNDFEKACQAKSEALVIREKSTLERIQKHQEIETKEIYAQRQLLLKDMDLLRGREAELKQRVEAFELNQKLQEEKHKSMTEALRRREQNIKSFEKTYDQKLKNELLKYQLELKDDYIIRTNRLIEDERKNKEKAVHLQEELIAFNSKKEELNQSINRMKELELELESVKAQSLAITKQNHMLNEKVKVMSDYSLLKEERLELLAQNKLLKQQLEESRNENLRLLNRLAQLAPELAVFQKELRRAEKATVVEHEEFESRKQALHKQLQDEIEHTTQLKAQILGYKVSIKRLTIQVADLKSQLKQTQTALENEVYCNPKQSVIHHSANGLINGNMVLHNGEISGDFLNNPFKQEKVLAGTVASRITNYPNAGMEGSSPDSDLEFVANTNARVKQLQQEAERLEKAFRSYHRRDIKNSAKGPLPAKSPPSLHLLEAFKNITSSSPERRIFAEDRVVSEQPQVGTLKEERNDILEALTGSAASRLCGGTSSRRLSSTPLPKAKRSLESEIYLEGLGRSHIASPSPYPDRMPPPSPAESRHNLSIPPFSSPPEQKAGLYWRQNELQDKSEFSDADKLAFKDNEEFESSFEYARNVPRQFEMDGPSPAGDMLHMGAAVAAVPLSYQHPSVDQKQIEEQKEEEKIWEQQVKERKQREERRQSNLQEILERERRELEKLYQERRMTEESLKIEMENELEMSNQEMKDKSAHSENPLEKYMKIIQQDQESADKSSKKMVQEGSLVDTLQCSDKVESLTRFSHEEPDDSW

SEQ ID NO: 32434 - protein, 65 aa, Homo sapiens
KNQLQSVMSSLGSHQNKETGLKTLIPESILPHIQNEIHAQRCQEESRQTGLSRLYKKHDASICFW

SEQ ID NO: 32435 - protein, 19 aa, Homo sapiens
MTELGCDSIEKLKAQIPKM

SEQ ID NO: 32436 - protein, 23 aa, Homo sapiens
KAALCAIRINEGEGFCVEKRLGV

SEQ ID NO: 32437 - protein, 7 aa, Homo sapiens
MQESTYQ

SEQ ID NO: 32438 - protein, 7 aa, Homo sapiens
IWEHFES

SEQ ID NO: 32439 - protein, 151 aa, Homo sapiens
LGSGQVVLGMDMGLREMCVGEKRTVIIPPHLGYGEAGVDGEVPGSAVLVFDIELLELVAGLPEGYMFIWNGEVSPNLFEEIDKDGNGEVLLEEFSEYIHAQVASGKGKLAPGFDAELIVKNMFTNQDRNGDGKVTAEEFKLKDQEAKQDEL

SEQ ID NO: 32440 - protein, 13 aa, Homo sapiens
IVAEHPRPAEVPP

SEQ ID NO: 32441 - protein, 14 aa, Homo sapiens
KESYCPPRVLAKEQ

SEQ ID NO: 32442 - protein, 75 aa, Homo sapiens
IRNIVEAAAVRDISEASVFDAYVLPKLYVKLHYCVSCAIHSKVVRNRSREVRKDRTPPPRFRPAGAAPRPPPKPM

SEQ ID NO: 32443 - skipped

SEQ ID NO: 32444 - protein, 180 aa, Homo sapiens
VQRHASPEDIKKAYRKLALKWHPDKNPENKEEAERKFKQVAEAYEVLSDAKKQDIYDKYGKEGLNGGGGGGSHFDSPFEFGFTFRNPDDVFREFFGGRDPFSFDFFEDPFEDFFGNRRGPRGSRSRGTGSFFSVFSGFPSFRSGFSSFDTGFTSFGSLGHGGLTSFSSTSFGGSGMGNFK

SEQ ID NO: 32445 - protein, 58 aa, Homo sapiens
VAPHCRFSSFLPPFRKCAKEHTDTEQTGHLCNHMEVCLILKLKKLSWKTERPSPDDIV

SEQ ID NO: 32446 - protein, 57 aa, Homo sapiens
KTILSRSLAVKENRECAKEHTDTEQTGHLCNHMEVCLILKLKKLSWKTERPSPDDIV

SEQ ID NO: 32447 - protein, 19 aa, Homo sapiens
RRYKSIRDLFCRPVRSINS

SEQ ID NO: 32448 - protein, 200 aa, Homo sapiens
VQVLVLDGRGHLLGRLAAIVAKQVLLGRKVVVVCCEGINISGNFYRNKLNYLAFLRKRMNTSPSRGPYHFRAPSRVFWRTVRGMLPHKTKRGQAALDRLKVSDGIPPPYDKKKRMVVPAALKVVRLKPTRKFAYLGRLAHEVGWKYQAVTATLEEKRKEKAKIHYRKKKQLMRLRKQAEKNVEKKIDKYTEVLKTHGLLV

SEQ ID NO: 32449 - protein, 18 aa, Homo sapiens
LYWLLEGGDSEDKEVKPV

SEQ ID NO: 32450 - protein, 32 aa, Homo sapiens
IAMRSLGFIFKGMKQLRLFWKTFWQLVKLEYN

SEQ ID NO: 32451 - protein, 31 aa, Homo sapiens
IGWGAADPLTWITWCVSAGLRRPTTSSPSVD

SEQ ID NO: 32452 - protein, 6 aa, Homo sapiens
LANYGL

SEQ ID NO: 32453 - protein, 21 aa, Homo sapiens
LSADLCPVCPVAPGDVSSRRG

SEQ ID NO: 32454 - protein, 90 aa, Homo sapiens [sequence omitted]

SEQ ID NO: 32455 - protein, 37 aa, Homo sapiens
MLVCCVLSFISSQLKLALLTWCTQSKNCKKTGAKPLP

SEQ ID NO: 32456 - protein, 49 aa, Homo sapiens
MSGYIDNVINQMTVYSSEKHRCSGRVWMRTRRYKSIRDLFCRPVRSINS

SEQ ID NO: 32457 - protein, 40 aa, Homo sapiens
MATSDHSTSPAWCTFLGSLSRLPSIAFIFLLPIKPVLFSF

SEQ ID NO: 32458 - protein, 104 aa, Homo sapiens
MRTHSSNCLKIEWTGSHLLKFLGSSGVTIPLKNSVFLAEICDCLFLSYFNLCVKHENLSSLGFIIRSHWHALSPLKHATVLWLSPCANLPLIFLDIDTKCICIF

SEQ ID NO: 32459 - protein, 35 aa, Homo sapiens
MTSPWNRLTAYDLIGDLYMGPTPIFPQETHTLIKG

SEQ ID NO: 32460 - protein, 186 aa, Homo sapiens
MELSAAAGRRRQAPWREFTGRHRTERSQERGSTPRKERSMGSRQPRKREREPRDCTPTCTNAASVSRSGARRAPGCAGRCITMKNCARAWRELSERACCFQAVPPSNMKQSWLIFLDTTLCSAWLLASSCPRLYAPLISFHCMCFNTVLLFPRLFGPTLSAKIQFNTDLSLRAIAWKCTKDTTTYC

SEQ ID NO: 32461 - protein, 35 aa, Homo sapiens
MPGATPAWCEWERARAPGFASKRGEDRGKRMQGGC

SEQ ID NO: 32462 - protein, 202 aa, Homo sapiens
MIGTIVLAFICLYLFIVIEFCVFVYVRDELDVLENNLESYITFTNHSGVLTPVILQVKELISVTKGVWVATILPAYLTCVSYLFHILVCYRKHMKRLWAGDKHFLPLKFHNPASSESMVAIARYSGWQIAYILWGYLIIHMVQSLCGMAIMYSLVLPIVQTRAWKCCKGWALGCKCWAGILSLTCSESWGPPNCYVDPWSWP

SEQ ID NO: 32463 - protein, 20 aa, Homo sapiens
LIFFFNREGLTIFGRLGAKD

SEQ ID NO: 32464 - protein, 26 aa, Homo sapiens
LKDSLGPGSNRPLWTLRPLHLRVVCL

SEQ ID NO: 32465 - protein, 32 aa, Homo sapiens
ITAGMQLKDSLGPGSNCPLWTLRPLHLRVVCL

SEQ ID NO: 32466 - protein, 14 aa, Homo sapiens
KYLGNYSADNDKGL

SEQ ID NO: 32467 - protein, 779 aa, Homo sapiens
LKSQTPKGGDKKESSKSLVRQGSFTIEKPSPNIPIELIPHINKQTSSTPSSLALTSASRIRERSESLDPDSSMDTTLILKDTEAVMAFLEAKLREDNKTDEGPDTPSYKRDNSISPESDVDTASTISLVTGETERKSTQKRKSFTSLYKDRCSTGSPSKDVTKSSSSGAREKMEKKTKSRSTDVGSRADGHKFVQSSGRIRQPSVDLTDDDQTSSVPHSAISDIMSSDQETYSCKPHGRTPLTSADEHVHSKLEGSKVTKSKTSPVVSGSSSKSTTLPRPRPTRTSLLRRARRGEASDSELADADKASVASEVSTTSSTSKPPTGRRNISRIDLLAQPRRTRLGSLSARSDSEATISRSSASSRTAEAIIRSGARLVPSDKFSPRIRANSISRLSDSKVKSMTSAHGSASVNSRWRRFPTGYASTSEDEFGSDHNSPKHTRLCTSPALKTTRLQSAGSAMPTSSSFKHRIKEQEDYIRDWTAHREEIARISQDLALIAREINDVAGEIDSVTSSGTAPSTTVSTAATTPGSAIDTREEVGDLHGEMHKLVDRVFDESLNFQKIPPLVHSKTPEGNNGRSGDPRPQAAEPPDHLTITRRRTWSRDEVMGDNLLLSSVFQFSKKIRQSIDKTAGKIRILFKDKDRNWDDIESKLRAESEVPIVKTSSMEISSILQELKRVEKQLQAINAMIDPDGTLEALNNMGFPSAMLPSPPKQKSSPVNNHHSPGQTPTLGQPEARALHPAAVSAAAEFENAESEADFSIHFNRVNPDGEEEDVTVHK

SEQ ID NO: 32468 - protein, 140 aa, Homo sapiens
LGTITPLREAENSFPKSFGDFSLFTHLRPCEELRGQFGRRARLPVRRVLGPGNREGPAIARRPPRGCERAWAPAEPRPWCSKPTMPRTRKRCWPARARTRAPASSWESPPPPRPAPPPPRAARPTTRAGARPRVGTSSDP

SEQ ID NO: 32469 - protein, 5 aa, Homo sapiens
LGWDG

SEQ ID NO: 32470 - protein, 30 aa, Homo sapiens
LARDPACSLLFARFASKRGEDRGKRMQGGC

SEQ ID NO: 32471 - protein, 38 aa, Homo sapiens
VVTIERSKSKITVTSEVPFSKRYLKYLNKKYLKNIGCA

SEQ ID NO: 32472 - protein, 16 aa, Homo sapiens
TCCLTIPEPRWEPWLR

SEQ ID NO: 32473 - protein, 5 aa, Homo sapiens
LQLPA

SEQ ID NO: 32474 - protein, 98 aa, Homo sapiens
VQPIRCTNCARCMPKDKAIKKFVIRNIVEAAAVRDISEASVFDAYVLPKLYVKLHYCVSCAIHSKVVRNRSREVRKDRTPPPRFRPAGAAPRPPPKPM

SEQ ID NO: 32475 - protein, 17 aa, Homo sapiens
LGPFSGNIFLVTMKGQY

SEQ ID NO: 32476 - protein, 35 aa, Homo sapiens
KPGRLLTGDDTCVGCWHSCYLTREGGDFACDGLPV

SEQ ID NO: 32477 - protein, 161 aa, Homo sapiens
IREEKKRKEEERKKKETDQKKEAVAPVQEESDLEKRRREAEALLQSMGLTPESPIVPPPMSPSSKSVSTPSEAGSQDSGDGAVGSRRGPIKLGMAKITQVDFPPREIVTYTKETQTPVMAQPKKDEEEDDDVVAPKLPIEPEEEKTLKKDEENDSKAPPMS

SEQ ID NO: 32478 - protein, 18 aa, Homo sapiens
VKTILSRSLAVKENRECE

SEQ ID NO: 32479 - protein, 30 aa, Homo sapiens
IATAGTGTQAAPRPFLIRPPDSWALALALM

SEQ ID NO: 32480 - protein, 158 aa, Homo sapiens
VFQKPSGVSAALALKGPLLVSTESHPVKSGIHKWISDYADSVPDPEALRVEVDTFMEAYDQKIAEEEAKAKEEEGVPDEEGWVKVTRRGRRPVLPRTEAASLRVLERERRKRSQKELLNYAWQHRESKMEHLAQLRKKFEEDKQRIELLRAQRKFRPY

SEQ ID NO: 32481 - skipped

SEQ ID NO: 32482 - protein, 50 aa, Homo sapiens
IKKKNNSNCKLATIPYVPHSWHHEGGRRSQADSHHHQDGKSRSGAFPLPG

SEQ ID NO: 32483 - protein, 16 aa, Homo sapiens
KKLSWKTERPSPDDIV

SEQ ID NO: 32484 - protein, 33 aa, Homo sapiens
MKTSMMSHLHLMTVSHWPATCSSLCLPDYNNSM

SEQ ID NO: 32485 - protein, 163 aa, Homo sapiens
MAPPVRLERPFPSRRFPGLLLAALVLLLSSFSDAYEEPPTFEAMELIGKPKPYYEIGEQVDYKCKKGHFYVPPLATHTICDRNHTWLPVSDEPCYRKTCPCIGDPLHGQAVLANGTYELGYQIHFICNEGYYLIGKEILYCELKGSVAVWSSKPPICEKILCT

SEQ ID NO: 32486 - protein, 5 aa, Homo sapiens
MSPRA

SEQ ID NO: 32487 - protein, 280 aa, Homo sapiens
MLWDQINSDHCTRATQDRYMEVSGNPRDLYDDKDGLRKEELGAISGPKEFSDFCNRLKQIKEFHRKHPNEIYVAMSVEFEELLKARENPSEEAQNSVEFTDEEGYGRYLDLHDCCLKYINLKASEKLDYITYLSILDQLFDIPKDRRNAEHKRYLEMLLEYLQDYTDRVKPLQDQNELSGKIQAEFEKKWENGIFPGWPKETSSALTQAGAHLDLSAFSSWEELASLGLDRLKSALLALGLKCGRIPEERAQRLFSTKGKSLESLDTSLFAKNPKSKGTK

SEQ ID NO: 32488 - protein, 324 aa, Homo sapiens [sequence omitted]

SEQ ID NO: 32489 - protein, 82 aa, Homo sapiens
MNQVLARITPSEVTPEGGLEGESNERERERKEGREGGRMEGCMDLDVWVPFLLPWQKLTHPSVSIQNGISSWAPSPESPASR

SEQ ID NO: 32490 - protein, 55 aa, Homo sapiens
MAVMGGRPRGWTDHRPMLCTHEAWLLLCESHLHGNGSGRNGPQGCCEDGLMGLHW

SEQ ID NO: 32491 - protein, 74 aa, Homo sapiens
MCKTCVPGKAPLSLQRSSESHGRSQQSSKCRLGKSRGLCGGWEGLIHIPTRKFSRTPACHLDPLEGPGSGWTTS

SEQ ID NO: 32492 - protein, 50 aa, Homo sapiens
MWVQGSHPPVEALDLRITNSHPTDFRPPTRAVFLLLHSALKSPKPLPGAA

SEQ ID NO: 32493 - protein, 69 aa, Homo sapiens
MLLQTRHSFLEGPLASHLQIRTHGLFSAAASSGVPVLLSARCSHTHAHSSRAGLYLRVTLPRSLAPASS

SEQ ID NO: 32494 - protein, 207 aa, Homo sapiens
MPKGKKAKGKKVAPAPAVMKKQEAKKVVNPLFEKRPKNFGIGQDIQPKRDLAHLVKRPCYIRLQRQRAILCKRLKVPPAIDQFAQALDCQTATQLLKLAHKYRLKTKQEKGQRLLAPAEKKAAGKGDVPTKRPPVLPAGVNTVTTLVENMKAQLVVIAHDVDPIELVTFLPALCRKMGVPYCIIKGKARLGCLVYRKTCTKAQKGKG

SEQ ID NO: 32495 - protein, 96 aa, Homo sapiens
MKPFQNFTTIPITQALNYNLSKEGHLEKEPWNAFSHHGPVNVSINGIPCILFWAKRIMIKFKNQTWLDLTDEPFGQKVTVDPDNSNCSEESARKKK

SEQ ID NO: 32496 - protein, 218 aa, Homo sapiens
MNVVGPLVRVHILLNIKECIQEKNSMNVMNVRKPSMITQLLFNIILSILQRNPMNIMTGKTFSYCSDLIQHQRMHTGEKPYKCNECGNAFSDCSSLIQHQRTHTGEEPYECKQCGKAFSRSTYLTQHQRSHAGEKQYKCNECEKTFSLSSFLTQHMRVQTGEKPYKYNEYGKAFSDCSGHFQRTHTGEKPCECNDCGKPFSFCSALIQHKRIHTRKKP

SEQ ID NO: 32497 - protein, 95 aa, Homo sapiens
MVKLTLGLVPRGTVMGSLLGKVLCLQLSLDDHVVAVCAGNKIFMLDIEVRLKFTWISRKGLADGASQVLGPCPAVFSFFLYSFFFKLYLQFSLLL

SEQ ID NO: 32498 - protein, 131 aa, Homo sapiens
MGVAPIERVKLLLEVQHASKQITADMQYKGIIDCVVHILKEQGVLSFWHRNLVNVLRYFPTQALNLAFKDKHKQIFLGGVDKRTQFGSYFAGNPASGGAAGATSLCFVYPLDFAHTCLAADVGKAGAEREF

SEQ ID NO: 32499 - protein, 15 aa, Homo sapiens
MPHVQDGRITISFNS

SEQ ID NO: 32500 - protein, 69 aa, Homo sapiens
MFSDPFCRHASDVSSGEDTGKDSKEQENTLASLIAFKVLSKVSFPQAERCTASFMLCFSYLPTLFTPSK

SEQ ID NO: 32501 - protein, 56 aa, Homo sapiens
MNFGLLCNPSGAFTDNIDFEVALTWPALPLTRLDCKLLEKGSTVSAEAAQRRKAAQ

SEQ ID NO: 32502 - protein, 45 aa, Homo sapiens
MNFGLLCNPSGAFTDNIDFEVALTWPALPLTRLGCGLPFHFLCPV

SEQ ID NO: 32503 - protein, 128 aa, Homo sapiens
MVQENKGHAVSLKEAQKVNRLQNEKIIEQQLLVDQLSEELTKLNLSVTSSAKENCGDGPDARIPEKRPYTVPFDTHLGHYIYIPSRQDSRRGNHLQGPHKSAYVLSGSNICWISNTKSDAVGSRRRTR

SEQ ID NO: 32504 - protein, 8 aa, Homo sapiens
IGQAVLNS

SEQ ID NO: 32505 - protein, 15 aa, Homo sapiens
RETVHRYICTSQGTI

SEQ ID NO: 32506 - protein, 15 aa, Homo sapiens
MCETCFPWAIGDTML

SEQ ID NO: 32507 - protein, 159 aa, Homo sapiens
LWRSLSREVKEHVGTDQFGNKYYYILQNKNWRGQTIQEKRIVEAANKKEVDYETGDIPTEWEAWIRRTRKTPPTMEEILKNEKHREEIKIKSQDFYEKEKLLSKETSEELLPPPVQTQIKGRASAPYFGKEKPSVAPSSTGKTFQPGSWMPRDGKSHNE

SEQ ID NO: 32508 - protein, 368 aa, Homo sapiens [sequence omitted]

SEQ ID NO: 32509 - protein, 15 aa, Homo sapiens
MCETCFPWAIGDTML

SEQ ID NO: 32510 - protein, 35 aa, Homo sapiens
ISPPSASDWIKGNHFSKGSLALSFQAILQPPEPST

SEQ ID NO: 32511 - protein, 10 aa, Homo sapiens
TRSLINSWGV

SEQ ID NO: 32512 - protein, 1044 aa, Homo sapiens
MMKTKMDLESQISDMRERLEEEEGMAASLSAAKRKLEGELSDLKRDLEGLETTLAKTEKEKQALDHKVRTLTGDLSLREDSITKLQKEKRALEELHQKTLDDLQAEEDKVNHLTKNNSKLSTQIHELEDNWEQEKKIRAEVEKARRKAESDLKMTIDNLNEMERSKLDLEEVVKKRDLEINSVNSKYEDEQSLNSTLQRKLKEHQDRIEELEEELEAERAMRAKVEKQRSDLSRDLEDLSDRLEEAGGATSAQIEQNRKREAELLKLRRELEEAALQSEATASTLRKKHVDSMAELTEHVESLQRVKSKLEKDKQVMKAEIDDLNASMETIQKSKMNAEAHVRKLEDSLSEANAKVAELERNQAEINAIRTRLQAENSELSREYEESQSRLNQILRIKTSLTSQVDDYKRQLDEESKSRSTAVVSLANTKHDLDLVKEQLEEEQGGKSELQRLVSKLNTEVTTWRTKYETDAIQRTEELEETKRKLAARLQEAEEAAETAQARAASLEKNKQRLQAEVEDLTIDLEKANAAAAALDKKQRLFDKMLAEWQQKCEELQVEVDSSQKECRMYMTESFKIKTAYEESLEHLESVKKENKTLQEEIKDLIDQLGEGGRSVHELQKLKKKLEMEKEELQVALEEAESSLEVEESKVIRIQLELAQVKADIDRRIHEKEEEFEATRKNHQRAIESLQASLEAEAKGRAEALRLKKKMETDLNEMEIQLDHANKNNSELVKTLKRLQQQIKDLQVQMDEDARQHEELRKQYNLQERRLSLLQTELEEVRSALEGSERSRKLLEQEVVEITEWHNEINIQNQSLLVVKRKLESDVQRISNEHEELISEFRLTEERAKKAMMDAARMAEELRQEQDHCMHLEKIKKNYEVTIKDLQAKMEEAEQLALKGGKRTIMKLEARIKELETELDGEQKQHVETVKTLCKNERRLKELVFQTEEDHKTNQRMQALVEKLQNKLKVYKRQIEEAEDQANQTLARYRKTVHELDDAEDRAGMAETALNKLRTRHRVAGKGITSVEIIQVSKTGTSKTLSEE

SEQ ID NO: 32513 - protein, 4 aa, Homo sapiens
MTYL

SEQ ID NO: 32514 - protein, 44 aa, Homo sapiens
LLSAAPSGASQLLSTLTLFLKKHRMDIRTISLRMLLSHTGKLAL

SEQ ID NO: 32515 - protein, 13 aa, Homo sapiens
RNEFSLKTCLFVI

SEQ ID NO: 32516 - protein, 62 aa, Homo sapiens
VGRGRRMPGNRRDAVRKATGCRSWKGTPGFPPSEPGWEVTSMRLNFSWIEREARSSACQQPP

SEQ ID NO: 32517 - protein, 55 aa, Homo sapiens
KLGKRIPGRSECNLVMKVAGGLAWQPHGGGEQALCVEDPRPACQCAKATGKASGW

SEQ ID NO: 32518 - protein, 44 aa, Homo sapiens
RRPDGDTFLLSFLSTTWLKTWRSQQYKESKSRSCAREQMNSSSC

SEQ ID NO: 32519 - protein, 11 aa, Homo sapiens
LEAQKFSPPVL

SEQ ID NO: 32520 - protein, 21 aa, Homo sapiens
IRSYLFQAVHTASLRSVCQTY

SEQ ID NO: 32521 - protein, 11 aa, Homo sapiens
VQGQRLKRLLY

SEQ ID NO: 32522 - protein, 4 aa, Homo sapiens
KDKD

SEQ ID NO: 32523 - protein, 8 aa, Homo sapiens
RRMIFSHT

SEQ ID NO: 32524 - protein, 58 aa, Homo sapiens
LTGKMSVWSEAGAIAATVTPGARRRQQQQQQQRGEETAASRSSRRSRGSNADSTLRTR

SEQ ID NO: 32525 - protein, 28 aa, Homo sapiens
LADSVGALNQERTRKRMGRTDPHSHQEV

SEQ ID NO: 32526 - protein, 23 aa, Homo sapiens
VKAFGKRGLCGSRGPILPWRPLT

SEQ ID NO: 32527 - protein, 27 aa, Homo sapiens
IPTRKFSRTPACHLDPLEGPGSGWTTS

SEQ ID NO: 32528 - protein, 7 aa, Homo sapiens
ISPPCTL

SEQ ID NO: 32529 - protein, 8 aa, Homo sapiens
IISPPCTL

SEQ ID NO: 32530 - protein, 8 aa, Homo sapiens
VPGVWYFS

SEQ ID NO: 32531 - protein, 20 aa, Homo sapiens
LHPLRGFHCPRGENAPGSVT

SEQ ID NO: 32532 - protein, 30 aa, Homo sapiens
RKEGEPQVSRRTMRLTEPAGRWRVSRALDI

SEQ ID NO: 32533 - protein, 59 aa, Homo sapiens
MIVFPETSQPRFLYSLQNCATGRRQHGRRDKPYRDNVQRRTGRGRKERRRGAGGRRRRY

SEQ ID NO: 32534 - protein, 145 aa, Homo sapiens
LKGPLLVSTESHPVKSGIHKWISDYADSVPDPEALRVEVDTFMEAYDQKIAEEEAKAKEEEGVPDEEGWVKVTRRGRRPVLPRTEAASLRVLERERRKRSQKELLNYAWQHRESKMEHLAQLRKKFEEDKQRIELLRAQRKFRPY

SEQ ID NO: 32535 - protein, 106 aa, Homo sapiens
MSRVLLDLGKGGAIEVQRIKKPQGFWALPPWEVSGHRREMKPVRSLESFGTSAISPGCYFLSMYSLLRMSSKTFEQRSVWLSSRAIRKGESWGPYSAMQPNPRKRN

SEQ ID NO: 32536 - protein, 139 aa, Homo sapiens
MEAAGFTAQVIILNHPGQISAGYALVLDCHTAHTACKFAELKEKIDRCSGKKLEDGPKFLKSGDAAIIYMVPGKPMCVESFSDYPPLGHFAVGHMRQTVAMGIIKAEDRKAAGVGKVTKSAQKAPKPSEYYPLYLPPQS

SEQ ID NO: 32537 - protein, 438 aa, Homo sapiens [sequence omitted]

SEQ ID NO: 32538 - protein, 38 aa, Homo sapiens
MTVYSSEKHRCSGRVWMRTRRYKSIRDLFCRPVRSINS

SEQ ID NO: 32539 - protein, 61 aa, Homo sapiens
MEAELACWLCTEELCVCHFLIVKTICPRFCSHQHSDVTTSIWSKEEIQNLYLLLNSTSVQR

SEQ ID NO: 32540 - protein, 39 aa, Homo sapiens
MQLETNTKAMEANNVVIRSGLTSHLIPSGIQNLALVIEI

SEQ ID NO: 32541 - protein, 41 aa, Homo sapiens
MILQFLNSNSIMDVFVPGVISLHTVGIQLIGTDWSNRGSWA

SEQ ID NO: 32542 - protein, 87 aa, Homo sapiens
MIVRPPQPCGTGSCFSLFGVSERLVARTPGKRKAEGHSGKRKPRAKRMATSDHSTSPAWCTFLGSLSRLPSIAFIFLLPIKPVLFSF

SEQ ID NO: 32543 - protein, 10 aa, Homo sapiens
MNSSKARNLF

SEQ ID NO: 32544 - protein, 51 aa, Homo sapiens [sequence omitted]

SEQ ID NO: 32545 - protein, 123 aa, Homo sapiens
MCPACHTASRKQSVMQVFWPEPHKDHEGAGGARPVAAVPGVGAACPAAGAGCTRSGRNTHLPLAGRRDRGAAGVRPVPPRHLCAAAVPPRQPHDVWPVSTAPLHAVLELPRALPLLQRPLRGA

SEQ ID NO: 32546 - protein, 15 aa, Homo sapiens
MTSVLPAATSFWVVE

SEQ ID NO: 32547 - protein, 13 aa, Homo sapiens
MAREDAKDWGRGS

SEQ ID NO: 32548 - protein, 117 aa, Homo sapiens [sequence omitted]

SEQ ID NO: 32549 - protein, 34 aa, Homo sapiens
MRLDIWNHNHNRPERPTSLMTSFFFQRKVSVWGT

SEQ ID NO: 32550 - protein, 207 aa, Homo sapiens
MAAGKESLCRHKMNKMSVATLRPLTPSLLCIKSHIWTLTEPSHVRCSILSFIYSRMSYSWYKNLKIGSSENIRERLSLPSILQQNFGTLNFGFTISQPRRIPLQFWNSTPIGNLKHFLNREKLKAFPLRNGTRQGGPLLPLLFDIILEVLDRAIRKEKEINGIQIGKEEVKLLLFAGDMIIYQKTLKTPLKSSSTGKGIQESFRIQN

SEQ ID NO: 32551 - protein, 33 aa, Homo sapiens
MLRKSGRGPWREARETLRGQPRPSAPREKRKAA

SEQ ID NO: 32552 - protein, 36 aa, Homo sapiens
MVPIDTDIRVGKDFVHRPKTLKGKSFHFGKGDIDFV

SEQ ID NO: 32553 - protein, 31 aa, Homo sapiens
RVLYIEGRVGKLIFFFNREGLTIFGRLGAKD

SEQ ID NO: 32554 - protein, 26 aa, Homo sapiens
LIPSVCFPTHDLLFPWPRHTKNNSIK

SEQ ID NO: 32555 - skipped

SEQ ID NO: 32556 - protein, 30 aa, Homo sapiens
LWMCRRVGLPFYRPFAELRGQSRRQSRKQP

SEQ ID NO: 32557 - protein, 26 aa, Homo sapiens
KRCLSPCLSSDLHSTVPGKVEPPASP

SEQ ID NO: 32558 - protein, 42 aa, Homo sapiens
LTSKVDQQRLQSPASFPTLMNCILKRTLSDWLCRLPVLEQDG

SEQ ID NO: 32559 - protein, 24 aa, Homo sapiens
RGMGNRQEMTRTASLRLCSRPSLC

SEQ ID NO: 32560 - protein, 10 aa, Homo sapiens
IGYSSDLALP

SEQ ID NO: 32561 - protein, 55 aa, Homo sapiens
LVVLDEELEGISPDELKDELPERQPRFIVYSYKYQHNGWESSISSVLYFLQSCWM

SEQ ID NO: 32562 - protein, 30 aa, Homo sapiens
IKGGEKHSERKKKSLFDITFLCFPSAWKTY

SEQ ID NO: 32563 - protein, 43 aa, Homo sapiens
TSAEVQLPQFLAQVDNYRHKPLKLECPVAGISIDLSQLSLQLQ

SEQ ID NO: 32564 - skipped

SEQ ID NO: 32565 - protein, 41 aa, Homo sapiens
KVSLRGAPAPASGGEGGTCRGRSSEALGPLCSPAIARAALT

SEQ ID NO: 32566 - protein, 167 aa, Homo sapiens
TVSRLSRETANCSAVRERERGRERLSSLGTITPLREAENSFPKSFGDFSLFTHLRPCEELRGQFGRRARLPVRRVLGPGNREGPAIARRPPRGCERAWAPAEPRPWCSKPTMPRTRKRCWPARARTRAPASSWESPPPPRPAPPPPRAARPTTRAGARPRVGTSSDP

SEQ ID NO: 32567 - protein, 45 aa, Homo sapiens
IGSGLAGSGGAGGPSSTVTWCALFSNHVAATQVRRGRSSWGCFSV

SEQ ID NO: 32568 - skipped

SEQ ID NO: 32569 - protein, 22 aa, Homo sapiens
KFQSCNDFWLVPRGLLDCCVKS

SEQ ID NO: 32570 - protein, 36 aa, Homo sapiens
RRSTEGAAKRAVSANPASLCGGLCHRAMGPEVPGPG

SEQ ID NO: 32571 - protein, 39 aa, Homo sapiens
LMMTAESGRAEDPKSFPRLAENKLPGRRMRRQETNCLES

SEQ ID NO: 32572 - protein, 30 aa, Homo sapiens
IWNHNHNRPERPTSLMTSFFFQRKVSVWGT

SEQ ID NO: 32573 - protein, 28 aa, Homo sapiens
VRSKNLLVGSGLGPFSGNIFLVTMKGQY

SEQ ID NO: 32574 - protein, 29 aa, Homo sapiens
KKDVFASPCAMIVNFLRPPQPCRTGVIAM

SEQ ID NO: 32575 - protein, 12 aa, Homo sapiens
KNCKKTGAKPLP

SEQ ID NO: 32576 - protein, 20 aa, Homo sapiens
LRERTTEPRINTNRRAMLLD

SEQ ID NO: 32577 - protein, 16 aa, Homo sapiens
ILWYTDRYKKKGSLPV

SEQ ID NO: 32578 - protein, 566 aa, Homo sapiens
LPGVRANYQRSGAGASVRVCACVCASAVEGGDQLLHTFNTALKRESERETGDAQIPPRSPKPTVPQIIVQSPKNRNRGNEQQLNMDEGIPHLQERQLLEHRDFIGLDYSSLYMCKPKRSMKRDDTKDTYKLPHRLIEKKRRDRINECIAQLKDLLPEHLKLTTLGHLEKAVVLELTLKHLKALTALTEQQHQKIIALQNGERSLKSPIQSDLDAFHSGFQTCAKEVLQYLSRFESWTPREPRCVQLINHLHAVATQFLPTPQLLTQQVPLSKGTGAPSAAGSAAAPCLERAGQKLEPLAYCVPVIQRTQPSAELAAENDTDTDSGYGGEAEARPDREKGKGAGASRVTIKQEPPGEDSPAPKRMKLDSRGGGSGGGPGGGAAAAAAALLGPDPAAAAALLRPDAALLSSLVAFGGGGGAPFPQPAAAAAPFCLPFCFLSPSAAAAYVQPFLDKSGLEKYLYPAAAAAPFPLLYPGIPAPAAAAAAAAAAAAAAAAFPCLSSVLSPPPEKAGAAAATLLPHEVAPLGAPHPQHPHGRTHLPFAGPREPGNPESSAQEDPSQPGKEAP

SEQ ID NO: 32579 - protein, 58 aa, Homo sapiens
VKTILSRSLAVKENRECAKEHTDTEQTGHLCNHMEVCLILKLKKLSWKTERPSPDDIV

SEQ ID NO: 32580 - protein, 31 aa, Homo sapiens
KHRCSGRVWMRTRRYKSIRDLFCRPVRSINS

SEQ ID NO: 32581 - protein, 64 aa, Homo sapiens
LVARTPGKRKAEGHSGKRKPRAKRMATSDHSTSPAWCTFLGSLSRLPSIAFIFLLPIKPVLFSF

SEQ ID NO: 32582 - protein, 40 aa, Homo sapiens
IPPIPANMTAAVSLTRSPAISASCAASRSASPWAWPWTWF

SEQ ID NO: 32583 - protein, 36 aa, Homo sapiens
VAAALNQDLDPDPKCHVFNVSSQRCQMGSAQPCLCC

SEQ ID NO: 32584 - protein, 81 aa, Homo sapiens
TEEREMAKTRRDRWMTTSAGQKTTLIAFMRMTASPSQKATLIASMRMTASPGQKTTLIASMSSPWGIHGEDIFEGEIPNAS

SEQ ID NO: 32585 - protein, 17 aa, Homo sapiens
TFTVMCMQGMHRCGNRN

SEQ ID NO: 32586 - protein, 52 aa, Homo sapiens
VNFTPDEWALLDPSQKNLYREVMQETLRNLASIEVLWKRDSLKVKVISMEKF

SEQ ID NO: 32587 - protein, 31 aa, Homo sapiens
RLTPAGRRDEEGRTAEGPGVSAIKSFEVTVA

SEQ ID NO: 32588 - protein, 143 aa, Homo sapiens
RRELTSNGFPENFSLDVPANTYNALKSRLCDPNADHTSCPSPCSLHAAGALPGTGRQRWRVELAHLADRKLSLRDVSRLRQGGERRSGIAVKVVRGGAGFAARLQGSVTLVQQGWFFPRLGGCQAWWRMGAVVWCGELLTCTS

SEQ ID NO: 32589 - protein, 61 aa, Homo sapiens
LVRWTLGQTARERQARGLTSSTPEFEPYEQWNLGTTKDPDIILSSVIEKRIWDLRRYLLIF

SEQ ID NO: 32590 - protein, 180 aa, Homo sapiens
RRVTLFLKGSPKNGKVVAVYGTLSDLLSVASSKLGIKATSVYNGKGGLIDDIALIRDDDVLFVCEGESFIDPQTDSKPPEGLLGFHTDWLTLNVGGRYFTTTRSTLVNKEPDSMLAHMFKDKSVWGNKQYHRGAFLIDRSPEYFEPILNSLRHGQLIVNDGINLLGVLEEARFFGIVSLI

SEQ ID NO: 32591 - protein, 166 aa, Homo sapiens
MCKTVICCRVTPLQKAQVVELVKKYRNAVTLAIGDGANDVSMIKSAHIGVGISGQEGLQAVLASDYSFAQFRYLQRLLLVHGRWSYFRMCKFLCYFFYKNFAFTLVHFWFGFFCGFSAQVGKSMFFFVCLFVCFCMILQMTLLHSSLLINSEHFLMADSSNSITIM

SEQ ID NO: 32592 - protein, 60 aa, Homo sapiens
LEPGTRSSLIEVQFMCLWVWMAQSVSGLRKADLAPTLTLTDPGIYSRNWKPSATGAWRSS

SEQ ID NO: 32593 - protein, 36 aa, Homo sapiens
KNERVQKHLKALTSELASARDESKKTANDMIHAENM

SEQ ID NO: 32594 - protein, 59 aa, Homo sapiens
VSPSSLTAPCASLPKLRARSKRTTIPDRGGPVFGQGYTSSCAPLLEPPNKLSRSICRRT

SEQ ID NO: 32595 - protein, 4 aa, Homo sapiens
LVKT

SEQ ID NO: 32596 - protein, 31 aa, Homo sapiens
KRALLLQCSAHKSLLVKEWDKTHLYAKPALQ

SEQ ID NO: 32597 - protein, 9 aa, Homo sapiens
RSLINSWGV

SEQ ID NO: 32598 - protein, 79 aa, Homo sapiens
KKFVIRNIVEAAAVRDISEASVFDAYVLPKLYVKLHYCVSCAIHSKVVRNRSREVRKDRTPPPRFRPAGAAPRPPPKPM

SEQ ID NO: 32599 - protein, 4 aa, Homo sapiens
RGFC

SEQ ID NO: 32600 - protein, 23 aa, Homo sapiens
VLHRSGFSESRKTAADRIPGTSV

SEQ ID NO: 32601 - protein, 7 aa, Homo sapiens
KRALLLQ

SEQ ID NO: 32602 - protein, 51 aa, Homo sapiens
ICFHKSVLFFSLFCLCISSNCLFKMPRIWTPSTSNRHWEGEGRKAECKMKW

SEQ ID NO: 32603 - protein, 5 aa, Homo sapiens
LLFGV

SEQ ID NO: 32604 - protein, 24 aa, Homo sapiens
ICRHLDFSHAVCQVSAATRRQGAG

SEQ ID NO: 32605 - protein, 27 aa, Homo sapiens
IEGRVGKLIFFFNREGLTIFGRLGAKD

SEQ ID NO: 32606 - protein, 9 aa, Homo sapiens
VCAFFFFPS

SEQ ID NO: 32607 - protein, 7 aa, Homo sapiens
LGMEGNK

SEQ ID NO: 32608 - protein, 31 aa, Homo sapiens
LRTLFNGPDQDLSGRTNVTLRQERQILFFIK

SEQ ID NO: 32609 - protein, 21 aa, Homo sapiens
IILSSVIEKRIWDLRRYLLIF

SEQ ID NO: 32610 - protein, 266 aa, Homo sapiens [sequence omitted]

SEQ ID NO: 32611 - skipped

SEQ ID NO: 32612 - protein, 77 aa, Homo sapiens
KKNNSNCKLATIPYVPHSWHHEGGRRSQADSHHHQDGKSRSGAFPLPGYGMCRCPTINSKQQRNDVSSIKSYFQWFH

SEQ ID NO: 32613 - protein, 6 aa, Homo sapiens
RSFRMR

SEQ ID NO: 32614 - protein, 296 aa, Homo sapiens
RTHSSCAWVLDKLKAEHECRITVDISLWKFETSKYYMTIIDVAGHRDFIKNMITGTSQADCTVLIVAAGVGEFEAVISQNGQTREHALLAYTLGVKQLIVGINKMDSTEPPYSQKRYEEIIKEVSTYIKKIGYNPDTVEFVPISSWNGDNMLEPSANMPWFKGWKVTGKDGNASGTTLFEVLDCILPPTRPTDKPLHLPLQGVYKIGGIGAVSVGRVETGILKPGTVVTFAPVTVRTEVKSVEMHHEALSEVFPGDTVGFSVKNVSLKDVHQGNIAGDSKNDSPMEAAGFIAQVII

SEQ ID NO: 32615 - protein, 114 aa, Homo sapiens [sequence omitted]

SEQ ID NO: 32616 - skipped

SEQ ID NO: 32617 - protein, 4 aa, Homo sapiens
MKFL

SEQ ID NO: 32618 - protein, 22 aa, Homo sapiens
MILLTATSASQVQAILLPQPPK

SEQ ID NO: 32619 - protein, 236 aa, Homo sapiens
MPIQKAKQNLFGQNRNFSNGHVVCEKKQQLELDSIVEETITGDYALIINGHSLAHALESDVKNDLLELACMCKTVICCRVTPLQKAQVVELVKKYRNAVTLAIGDGANDVSMIKSAHIGVGISGQEGLQAVLASDYSFAQFRYLQRLLLVHGRWSYFRMCKFLCYFFYKNFAFTLVHFWFGFFCGFSAQVGKSMFFFVCLFVCFCMILQMTLLHSSLLINSEHFLMADSSNSITIM

SEQ ID NO: 32620 - protein, 154 aa, Homo sapiens
MRESRPGAPRSPPPSRPRRPAPRRQVSRALGEEAGGRREGSPGQPGVGRASGAAEWGRGRDAPDPRRPHPGRPPRAGLPQHSLSPALAQIAQTRRGSQPGQQAAGAGRRAGAGRLEPEPAALHAPLSVLPGGRTPPPPSPHPPGRAPRSTEPIF

SEQ ID NO: 32621 - protein, 24 aa, Homo sapiens
KDRCTLLGLEKKTKMSKRDAPSVL

SEQ ID NO: 32622 - protein, 23 aa, Homo sapiens
VVGTMALSSVAQWSSSEDAKVRA

SEQ ID NO: 32623 - protein, 15 aa, Homo sapiens
LIRKPSRKKLFVLQT

SEQ ID NO: 32624 - protein, 242 aa, Homo sapiens
IHQVRAVLTTTAFPFVSVMSWKKALRIPGDLRVATVTLMLAMLSSLLAEGRDSPEDFVFQFKGMCYFTNGTERVRLVTRYIYNREEYARFDSDVGVYRAVTPQGRPDAEYWNSQKEVLEGTRAELDTVCRHNYEVAFRGILQRRVEPTVTISPSRTEALNHHNLLVCSVTDFYPGQIKVRWFRNDQEETAGVVSTPLIRNGDWTFQILVMLEMTPQRGDVYTCHVEHPSLQSPITVEWRLLH

SEQ ID NO: 32625-32626 - skipped (2 entries)

SEQ ID NO: 32627 - protein, 95 aa, Homo sapiens
IRCTNCARCMPKDKAIKKFVIRNIVEAAAVRDISEASVFDAYVLPKLYVKLHYCVSCAIHSKVVRNRSREVRKDRTPPPRFRPAGAAPRPPPKPM

SEQ ID NO: 32628 - protein, 4 aa, Homo sapiens
ILIA

SEQ ID NO: 32629 - protein, 63 aa, Homo sapiens
KKRGWYPGSSRCNFREVLVCLVRELRGPGIVFKVVLLPTCPVVPAPVLTATLPFFHPRVGSTK

SEQ ID NO: 32630 - protein, 20 aa, Homo sapiens
MKQLRLFWKTFWQLVKLEYN

SEQ ID NO: 32631 - protein, 41 aa, Homo sapiens
VARSWVCHKTYVTPRRPFEKSRLDQELKLIGEYGFRNKREV

SEQ ID NO: 32632 - protein, 36 aa, Homo sapiens
LTFNFRVLYIEGRVGKLIFFFNREGLTIFGRLGAKD

SEQ ID NO: 32633 - protein, 22 aa, Homo sapiens
LEQKIEVHFMPPFESLALSPRL

SEQ ID NO: 32634 - protein, 18 aa, Homo sapiens
RPYRITDFMLALPPYKIT

SEQ ID NO: 32635 - skipped

SEQ ID NO: 32636 - protein, 56 aa, Homo sapiens
LVATGSATAENVLPCGFLSSCPWPEVPALMAAPHLQLLCSPLPKPYGLPCICIHPV

SEQ ID NO: 32637 - protein, 17 aa, Homo sapiens
LEDRNKIENENIVKSFR

SEQ ID NO: 32638 - protein, 11 aa, Homo sapiens
LHMSAWLFLLF

SEQ ID NO: 32639 - protein, 11 aa, Homo sapiens
LKEKIQLSDKG

SEQ ID NO: 32640 - protein, 17 aa, Homo sapiens
LLGSKVSNFTVFNALSI

SEQ ID NO: 32641 - protein, 54 aa, Homo sapiens
ILVYDITDEDSFQKVKNWVKELRKMLGNEICLCIVGKHHYFFLKKKSSVSLMFY

SEQ ID NO: 32642 - protein, 33 aa, Homo sapiens [sequence omitted]

SEQ ID NO: 32643 - protein, 274 aa, Homo sapiens
VEALQEFGPISYAVVMPKKRQALVEFEDVLGACNAVSYAADNQIYIAGHPAFVNYSTSQKISLPGDSDDSRSVNSVLLFTILNPIYSITTDVLYTICNPCGPVQRIIIFRKNGVQAMVEFDSVQSAQRAKASLNGAGIYSGCCTLKMEYAKPTRLNVFKNDQDTWDYTNPNLSGQGDPGSNPNKRQRQPPLLGDHPAEYGGPHGGYHSHYHDEGHGPPRPHYEGRRMGPPVGGHCRGPSRYGPPVWAPPTPSPTTRVWPSRRQPCARGLRLASI

SEQ ID NO: 32644 - protein, 128 aa, Homo sapiens
VKPKIVKKRTKKFIRHQSDHYVKIKRNWWKPRGIDNRVRRRFRVQILMPNTGYGSNKKTKHMLPSGFRKFLVHNVKELEVLLMCNNRTCAEIAHNVSSKNRKAIVERAAQLAITVTNPSARLCSEENE

SEQ ID NO: 32645 - protein, 29 aa, Homo sapiens
MILKGFLLMVAFVLSSKILFSVVCKQVFF

SEQ ID NO: 32646 - protein, 1424 aa, Homo sapiens
MVSESDFSKDVAVQVLPLDKIEENNKQKANDIFISQYTMGQKDALRTVLKQKAQSMPVFKEVKVHLLEDAGIEKDAVTQETRISPSGIDSATTVAAATAAAIATAAPLIKVQSDLEAKVNSVTELLSKLQETDKHLQRVTEQQTSIQRKQEKLHCHDHEKQMNVFMEQHIRHLEKLQQQQIDIQTHFISAALKTSSFQPVSMPSSRAVEKYSVKPEHPNLGSCNPSLYNTFASKQAPLKEVEDTSFDKQKSPLETPAPRRFAPVPVSRDDELSKRENLLEEKENMEVSCHRGNVRLLEQILNNNDSLTRKSESSNTTSLTRSKIGWTPEKTNRFPSCEELETTKVTMQKSDDVLHDLGQKEKETNSMVQPKESLSMLKLPDLPQNSVKLQTTNTTRSVLKDAEKILRGVQNNKKVLEENLEAIIRAKDGAAMYSLINALSTNREMSEKIRIRKTVDEWIKTISAEIQDELSRTDYEQKRFDQKNQRTKKGQNMTKDIRTNTQDKTVNKSVIPRKHSQKQIEEHFRNLPMRGMPASSLQKERKEGLLKATTVIQDEDYMLQVYGKPVYQGHRSTLKKGPYLRFNSPSPKSRPQRPKVIERVKGTKVKSIRTQTDFYATKPKKMDSKMKHSVPVLPHGDQQYLFSPSREMPTFSGTLEGHLIPMAILLGQTQSNSDTMPPAGVIVSKPHPVTVTTSIPPSSRKVETGVKKPNIAIVEMKSEKKDPPQLTVQVLPSVDIDSISNSSADVLSPLSSPKEASLPPVQTWIKEEEKCDEIPDSEPILEFNRSVKADSTKYNGPPFPPVASTFQPTADILDKVIERKETLENSLIQWVEQEIMSRIISGLFPVQQQIAPSISVSVSETSEPLTSDIVEGTSSGALQLFVDAGVPVNSNVIKHFVNEALAETIAVMLGDREAKKQGPVATGVSGDASTNETYLPARVCTPLPTPQPTPPCSPSSPAKECVLVKTPDSSPCDSDHDMAFPVKEICAEKGDDMPAIMLVNTPTVTPTTTPPPAAAVFTPTLSDISIDKLKVSSPELPKPWGDGDLPLEEENPNSPQEELHPRAIVMSVAKDEEPESMDFPAQPPPPEPVPFMPFPAGTKAPSPSQMPGSDSSTLESTLSVTVTETETLDKPISEGEILFSCGQKLAPKILEDIGLYLTNLNDSLSSTLHDAVEMEDDPPSEGQVIRMSHKKFHADAILSFAKQNQESAVSQQAVYHSEDLENSVGELSEGQRPQLTAAAENILMGHSLYMQPPVTNTQSLDQQCDPKPLSRQFDTVSGSIYEDSCASHGPMSLGELELEPNSKLVLPTTLLTAQENDVNLPVAAEDFSQYQLKQNQDVKQVEHKPSQSYLRVRNKSDIAPSQQQETRSHSVVQAGLELLGSSSLPTSASQSAGITSVSHRTWQHNVFKVHPYCSRYHYFIFFCR

SEQ ID NO: 32647 - protein, 338 aa, Homo sapiens
MGDGEGHFEGAVGSTMAPEERSGGSGWWEEARRNWFSVCPLSRRRRSLGRKGRMGGQVGCQGLPLTPSFPLFTLSSLPQDLEELALYQIQLLKDLRHTENEEDKVSSSSFRQRMLGNLLRPPYERPELPTCLYVIGLTGISGSGKSSIAQRLKGLGAFVIDSDHLGHRAYAPGGPAYQPVVEAFGTDILHKDGIINRKVLGSRVFGNKKQLKILTDIMWPIIAKLAREEMDRAVAEGKRVCVIDAAVLLEAGWQNLVHEVWTAVIPETEAVRRIVERDGLSEAAAQSRLQSQMSGQQLVEQSHVVLSTLWEPHITQRQVEKAWALLQKRIPKTHQALD

SEQ ID NO: 32648 - protein, 662 aa, Homo sapiens
IVSERRLNQEVALNLKEDHEVEVGVLKESVDLPEEKLPISDSPPDTQEIHVIEQEKLEAQDSGEEARNLSFNELYPSGTLKLQYNFDTIDQQFCDLADNKDTAECDIAEVDGELFVAPSNFTLILEGEEGEVEPGDFASSDVLPKAANTATEEKLVCSGKNDNHGQVANLPSAVTSDQKSQKVETLPYVPEPIKVAIAENLLDVIKDTRSKEITSDTMEQSIHETIPLVSQNIMCPTKLVKSAFKTAQETSTMTMNVSQVDDVVSSKTRTRGQRIQNVNVKSAQQEASADVATPKMPGQSVKKKTRKAKEISEASENIYSDVRGLSQNQQIPQNSVTPRRGRRKKEVNQDILENTSSVEQELQITTGRESKRLKSSQLLEPAVEETTKKEVKVSSVTKRTPRTIKRSVENQESVEIINDLKVSTVTSPSRMIRKLRSAHLDASENTGNKQEDKSSDKQLPIKHIRRVRGREVSPSDVRENSNLESSQLTLQAEFDMSAIPRKRGRPRKINPSEDVGSKAVKEERSPKKKEAPSIKRRSTRNTPAKSENVDVGKPALGKSILVPNEELSMVMSSKKKLTKKTESQSQKRSLHSVSEERTDEMTHKETNEQEERLLATASFTKSSRSTRTQSSKAILLPDLSEPNNEPLFSPAAEVPRKQKLKK

SEQ ID NO: 32649 - protein, 32 aa, Homo sapiens
LVSGHILSNSPVAAVMCSSMGTHLSPFKGTLL

SEQ ID NO: 32650 - protein, 25 aa, Homo sapiens
ILPRRRGWPSWRPEPSSCYSRGPWP

SEQ ID NO: 32651 - protein, 279 aa, Homo sapiens
IHQVRAVLTTTAFPFVSVMSWKKALRIPGDLRVATVTLMLAMLSSLLAEGRDSPEDFVFQFKGMCYFTNGTERVRLVTRYIYNREEYARFDSDVGVYRAVTPQGRPDAEYWNSQKEVLEGTRAELDTVCRHNYEVAFRGILQRRVEPTVTISPSRTEALNHHNLLVCSVTDFYPGQIKVRWFRNDQEETAGVVSTPLIRNGDWTFQILVMLEMTPQRGDVYTCHVEHPSLQSPITVEWRAQSESAQSKMLSGVGGFVLGLIFLGLGLIIRQRSQKGLLH

SEQ ID NO: 32652 - protein, 36 aa, Homo sapiens
LLFRFRAYSLLAVSCHHVGNRSCRDSHPSAGGEIPG

SEQ ID NO: 32653 - protein, 26 aa, Homo sapiens
MVQRHKLKLTAFGANCICSLLGGSRG

SEQ ID NO: 32654 - protein, 31 aa, Homo sapiens
KKREEPLVMPVWWRRRRLRARSWALRAYRLL

SEQ ID NO: 32655 - protein, 27 aa, Homo sapiens
LSRSTSTRALSLVSWSTCRRSSRISSS

SEQ ID NO: 32656 - protein, 112 aa, Homo sapiens
LCKKKDGTKKGRVNGAQTYGLKACALPICCLAPSETRAKICPGLECFPEWLELEPGTRSSLIEVQFMCLWVWMAQSVSGLRKADLAPTLTLTDPGIYSRNWKPSATGAWRSS

SEQ ID NO: 32657 - protein, 162 aa, Homo sapiens
LEAGAMTFHYIIEQGVCDLVLCEAAFPKTLAFAYLEDLHSEFDEQHGKKVPTVSRPYSFIEFDTFIQKTKKLYIDSCARRNLGSINTELQDVQRIMVANIEEVLQRGEALSALDSKANNLSSLSKKYRQDAKYLNMHSTYAKLAAVAVFFIMLIVYVRFWWL

SEQ ID NO: 32658 - protein, 12 aa, Homo sapiens
KAEVCAFFFFPS

SEQ ID NO: 32659 - protein, 15 aa, Homo sapiens
IAWLKPDTFNRYVLF

SEQ ID NO: 32660 - protein, 209 aa, Homo sapiens
IKEDTEEHHLRDYFEQYGKIEVIEIMSDRGSGKKRGFAFVTFDDHDSVDKIVIQKYHTVNGHNCEVTKALSKQEMASASSSQRGRSGSGNFGGGRGGGFSGNDNFGHGGNFSGHGGFGGSHGGGGYGGNGDGYNGFGNDGSNFGGGGSYKDFGNYNNQSSNFGPMKGGNFGGRSSGPHGGGGQYFAKPRNQGGYGGSSSSSSYGSGRRF

SEQ ID NO: 32661 - protein, 384 aa, Homo sapiens
IEQSWGSPKVTKDGVTVAKSIDLKDKYKNIGAKLVQDVANNTNEETGDGPTTATVLARSIAKEGIEKISKGANPVEIRRGVMLVVDAVIAELKKQSKPVTTPEEIAQVATISANGDKEIGNISDAMKKVGRKGVITVKDGKTLNDELEIIEGIKFDRGYISPYFINTSKGQKCEFQDAYVLLSEKKISSVQSVVPALEIANAHRKPLVIIAEDVDGEALSTLVLNRLKVGLQDVAIKAPGFGDNRKNQLKDMAIATGGAVFGEEGLTLNLEDVQPHDLGNVGEVIVTKDDATLLKEKGDKAQIEKRIQEIIEQLDVTTSEYEKEKLNERLAKLSDVVAVLKVGGTSDVEVNEKKDRVRMPLMLQELLLKKALYWEGVVPCFDAF

SEQ ID NO: 32662 - protein, 244 aa, Homo sapiens
KFLVAGTHLGGTNLDFQMEQYIYKRKSDGIYIINLKRTWEKLLLAARAIIAIENPADVSVISSRNTGQRAVLKFAAATEATPIAGHFTPGTFTNQIQADFWEPRLLVVTDPRADHQPLTEASYVNLPTIALCNTDSPLRYVDIAIPCNNQGARSVGLMWWTLAREVLRMRGTISREHLWEVMPDLYFYRDPEEIEKEEQAATEKAVTKEEFQGEWTAPAPEFTATKPEVADWSEGVQVPSVPIQ

SEQ ID NO: 32663 - protein, 271 aa, Homo sapiens
LQEFGPISYAVVMPKKRQALVEFEDVLGACNAVSYAADNQIYIAGHPAFVNYSTSQKISLPGDSDDSRSVNSVLLFTILNPIYSITTDVLYTICNPCGPVQRIIIFRKNGVQAMVEFDSVQSAQRAKASLNGAGIYSGCCTLKMEYAKPTRLNVFKNDQDTWDYTNPNLSGQGDPGSNPNKRQRQPPLLGDHPAEYGGPHGGYHSHYHDEGHGPPRPHYEGRRMGPPVGGHCRGPSRYGPPVWAPPTPSPTTRVWPSRRQPCARGLRLASI

SEQ ID NO: 32664 - protein, 518 aa, Homo sapiens
LAPAGTGCFDLLLDAEKCKYGMEIPTNIPGLGAAGPTGMFFGSAPSPMGGISPAMTPWNQGATPAYGAWSPSVGSGMTPGAAGFSPSAASDASGFSPGYSPAWSPTPGSPGSPGPSSPYIPSPGGAMSPSYSPTSPAYEPRSPGGYTPQSPSYSPTSPSYSPTSPSYSPTSPNYSPTSPSYSPTSPSYSPTSPSYSPTSPSYSPTSPSYSPTSPSYSPTSPSYSPTSPSYSPTSPSYSPTSPSYSPTSPSYSPTSPSYSPTSPSYSPTSPSYSPTSPSYSPTSPNYSPTSPNYTPTSPSYSPTSPSYSPTSPNYTPTSPNYSPTSPSYSPTSPSYSPTSPSYSPSSPRYTPQSPTYTPSSPSYSPSSPSYSPTSPTSTPQPVLLTVPAPQSIPQPLPSTHLPVPNIHPPLPSTRLPVPPIHPPPQNTPQHLLLIPQPLQSTPQPLPSTHLLAPLTRPLPPSTRPPAPPTRPPPPKAQPTLPLPLVTRPPAPPTVSQARLSARMTVTRRTEGTWGAAAG

SEQ ID NO: 32665 - protein, 144 aa, Homo sapiens
LLCYNRSCGQRFDPETNSDDACTYHPGVPVFHDALKGWSCCKRRTTDFSDFLSIVGCTKGRHNSEKPPEPVKPEVKTTEEKELSELKPKFQEHIQAPKTVDAIKRPSPDEPMTNLELKISASLKQALDKLKLSSGNEENKKRRQ

SEQ ID NO: 32666 - protein, 85 aa, Homo sapiens
KLDLKTKSENGLEFTSSGSANTETTKVTGSLETKYRWTEYGLTFTEKWNTDNTLGTEITVEDQLACGLKLTFDSSFSPNTGGEKC

SEQ ID NO: 32667 - protein, 1808 aa, Homo sapiens [sequence omitted]

SEQ ID NO: 32668 - protein, 154 aa, Homo sapiens
MVAVGFMIAHFSVFRRFPISRGPSCALWFPAVTRAFSTQRMEGIYTHTHPSPSPQLWNKHSKSSILVGEMGNSYLSLTFILQTTYSFSRHGTHLVLFGFFFGFVVVVSVWAWFCLFLETRSRSVAQGWSAVARSWLTEASTSRAQAILLPQPPG

SEQ ID NO: 32669 - protein, 23 aa, Homo sapiens
LEDMATPVGVEHGEQSQAFSDDD

SEQ ID NO: 32670 - protein, 19 aa, Homo sapiens
KSKPNSSHWHTGIRQKAGS

SEQ ID NO: 32671 - protein, 146 aa, Homo sapiens
IRKPVTVHSRARCRKNTLARRKGRHVAIGEQKGTANARMPEKVTWMRRMTILRRLLRRYRESKKIDRHTYHSLYLKVKGNVFKDKRILMEHIHKLKADKARKKLLADQAEARRSKTKEAGKCPEERLQAKKEEFIKTLSKEEETKK

SEQ ID NO: 32672 - protein, 205 aa, Homo sapiens
KKKNNIKLYVRRDFIMDNCEELIPEYLNFIRGVVDSEDLPLNISREMLQQSKILKVIRKNLVKKCLELFTELAEDKENCKKFYEQFSKNIKLGIQEDSQNRKKLSELLRYYTSASGDEMVSLKDYCTRMKEKQKHIYYITGETKDQVANSAFVERLGKHGLEVIYMIEPIDEYCVQQLKEFEGKTLVPVTKEGLELPEDEEKKKK

SEQ ID NO: 32673 - protein, 596 aa, Homo sapiens
MPLLAPAAATVFLEIWKRQRARVVLHWDLYVWDEEQEEMALQLINCPDYKLRPYQHSYLRSTVILVLTLLMICLMIGMAHVLVVYRVLASALFSSSAVPFLEEQVTTAVVVTGALVHYVTIIIMTKINRCVALKLCDFEMPRTFSERESRFTIRFFTLQFFTHFSSLIYIAFILGRINGHPGKSTRLAGLWKLEECHASGCMMDLFVQMAIIMGLKQTLSNCVEYLVPWVTHKCRSLRASESGHLPRDPELRDWRRNYLLNPVNTFSLFDEFMEMMIQYGFTTIFVAAFPLAPLLALFSNLVEIRLDAIKMVWLQRRLVPRKAKDIGQTGRAQDGRELGGLRPVGFPLARPAHLEKIISRISGRRQPPALLRRPRMRVEPGWEGTRSGRGRALCRLLPQTVRISEGLDAPKGDPGSASGWGWNRAAGLCPKTGHAETDRQQGSDGSWGAGCGERERGVREAPSLGPRLQGLTLGWEPRRWSGWGAQLRSSGRWRMRIPRFLPVHVRVRGAGAQRPCSAMAGDFLVNTAALGLQGDTTHRDTAGPVLAGGGGEGRTSRGTLSQTACPLLWCRDLAAGAGDHRCAGGHCQWDGHCLHI

SEQ ID NO: 32674 - protein, 46 aa, Homo sapiens
MRDELGSSGLRRLCCVPMFRLPQTGISSLSEELLHFIWEQKTAGSC

SEQ ID NO: 32675 - protein, 9 aa, Homo sapiens
MPSPIRVLL

SEQ ID NO: 32676 - protein, 92 aa, Homo sapiens
LKACALPICCLAPSETRAKICPGLECFPEWLELEPGTRSSLIEVQFMCLWVWMAQSVSGLRKADLAPTLTLTDPGIYSRNWKPSATGAWRSS

SEQ ID NO: 32677 - protein, 25 aa, Homo sapiens
IATEVLKSKPNSSHWHTGIRQKAGS

SEQ ID NO: 32678 - protein, 248 aa, Homo sapiens
LGCPCFVLWTTAQQCPALCLGLGPSCTCCLDPRPAWAWALVLPMTPPERLFLPRVCGTTLHLLLLGLLLVLLPGAQGLPGVGLTPSAAQTARQHPKMHLAHSTLKPAAHLIGDPSKQNSLLWRANTDRAFLQDGFSLSNNSLLVPTSGIYFVYSQVVFSGKAYSPKATSSPLYLAHEVQLFSSQYPFHVPLLSSQKMVYPGLQEPWLHSMYHGAAFQLTQGDQLSTHTDGIPHLVLSPSTVFFGAFAL

SEQ ID NO: 32679 - protein, 10 aa, Homo sapiens
LSLMFKQSCE

SEQ ID NO: 32680 - protein, 50 aa, Homo sapiens
VPERRKRRPDGDTFLLSFLSTTWLKTWRSQQYKESKSRSCAREQMNSSSC

SEQ ID NO: 32681 - protein, 24 aa, Homo sapiens
VLLEKNLQAAHGMPWTLLWEDPII

SEQ ID NO: 32682 - protein, 15 aa, Homo sapiens
VIEDTPSSKNAKHIQ

SEQ ID NO: 32683 - protein, 34 aa, Homo sapiens
IARHRTPSLEICRHLDFSHAVCQVSAATRRQGAG

SEQ ID NO: 32684 - protein, 36 aa, Homo sapiens
MHGSDFPPRLCLHSMSLWGSWGSRPPSPAHSREVAS

SEQ ID NO: 32685 - protein, 83 aa, Homo sapiens
MGQGEPGGPQGDPWVPHELLLPSLCDSSHASSWGSGSITCAWRGGDSSSHPLVSGHILSNSPVAAVMCSSMGTHLSPFKGTLL

SEQ ID NO: 32686 - protein, 37 aa, Homo sapiens
KSLDKQKKKTKMTDEEIMEKLRTIVSIGDPKKKIYKI

SEQ ID NO: 32687 - protein, 56 aa, Homo sapiens
LLSASSFPRTSLFCFFKKRQERTKLPPPSPPVGLHLCLALCTEVESARGRERKEKK

SEQ ID NO: 32688 - protein, 25 aa, Homo sapiens
KDPDIILSSVIEKRIWDLRRYLLIF

SEQ ID NO: 32689 - protein, 165 aa, Homo sapiens [sequence omitted]

SEQ ID NO: 32690 - protein, 140 aa, Homo sapiens
MDGGGSPKGDVDPFYYGKPGPLRTLPEPSGPLPPSSGLSQPQVHALCPLSPLVTTGCCGQAAERDSCWERPPIPLLLPSLSGDYETVRNGGLIFAGLAFIVGLLILLSKWGGLQGRGADQGTSLLKAAEQAGFRELPREG

SEQ ID NO: 32691 - protein, 160 aa, Homo sapiens
MCQARIALDRSSPSWNSYGTLAPETTNSSLKFSNSNNGISDLAFLYFSHVNKIGSASTMGYMLSYRVSLCRPGWSAVARDLGSLQAPPPGFTPFSCLSLLSSWDYRRPPPHPGKTEPEQLRILPTVTELAMLVMNIPKAFMSSTIWNRSLCDLFSYLLNI

SEQ ID NO: 32692 - protein, 87 aa, Homo sapiens
MPRPPETMCQARIALDSSPSWNSYGTLAPETTNSSLKFSNSNNGISDLAFLYFSHVNKIGSASTMGYMLSYRVRLCLKKKEKINNQM

SEQ ID NO: 32693 - protein, 78 aa, Homo sapiens
MPRPPETMCQARIALDRSSPSWNSYGTLAPETTNSSLKFSNSNNEFRSVAQAGVQWRAISVHCKLHLPGSRHSPASAS

SEQ ID NO: 32694 - protein, 12 aa, Homo sapiens
MREAMRPPQTLQ

SEQ ID NO: 32695 - protein, 119 aa, Homo sapiens
MDPDTKLTGNMALLPIRSQFKGPAPRETKDTDIVDEAICYFKANVFFKNYEIKNEADRTLIYITLYISECSKKLQKYNSKIQGEKEMYTLGITNFPIPGEPHFPLNAIMPNLRTNRKMK

SEQ ID NO: 32696 - protein, 17 aa, Homo sapiens
MKIKHVILDYVPFCYYF

SEQ ID NO: 32697 - protein, 35 aa, Homo sapiens
MHQLMMTAESGRAEDPKSFPRLAETQAKLLLTVTG

SEQ ID NO: 32698 - protein, 42 aa, Homo sapiens
MHVPSGAQLGLRILLHLGFRHFQSEKIHILSALWTDLRTVLT

SEQ ID NO: 32699 - protein, 109 aa, Homo sapiens [sequence omitted]

SEQ ID NO: 32700 - protein, 40 aa, Homo sapiens
MTSLQSFLQRHVCQGCRIAGRAGKTGFGARGGRFVCGAAL

SEQ ID NO: 32701 - protein, 16 aa, Homo sapiens
LDPHLPLRIFSIFLFI

SEQ ID NO: 32702 - protein, 13 aa, Homo sapiens
MLRVHYPRLFIQE

SEQ ID NO: 32703 - protein, 33 aa, Homo sapiens
LGWMRRSRRRRGGDRTEDGPCREEQAGENESRL

SEQ ID NO: 32704 - protein, 21 aa, Homo sapiens
VVLKSKPNRFPSFRKTLERAS

SEQ ID NO: 32705 - protein, 92 aa, Homo sapiens
LPRPEVSFLTEYLRKLKACEGGGVEIAAASFPRIYLMGMCSRQDRIQKDIDVVIQKSRAEDCLFADTVQDNLLFIFSVNFKDDWDFLPPLPP

SEQ ID NO: 32706 - protein, 305 aa, Homo sapiens
LPPPALMVVSGRRLLTALLQAQKWPFQPSRDMRLVQFWAPHLVGPHLGLETGNGRGIINLNAFDPTLPKTMTQFLEQGEATLSVARRALAAQLPVLPRSEVTFLAPVTWPDKVVCVGMNYVDHCKEQNVPVPKEPIIFSKFASSIVGPYDEVVLPPQSQEVDWEVELAVVIGKKGKHIKATDAMAHVAGFTVAHDVSARDWLTRCNGKQWLLGKTFDTFCPLGPALVTKDSVADPHNLKICCRVNGEVVQSSNTNQMVFKTEDLIAWVSQFVTFYPGDVILTGTPPPPPRCRCIQETSCLSQEGG

SEQ ID NO: 32707 - protein, 11 aa, Homo sapiens
LVLKIGVSFPR

SEQ ID NO: 32708 - protein, 16 aa, Homo sapiens
LPLKGILMLTTSPRRA

SEQ ID NO: 32709 - protein, 39 aa, Homo sapiens
IFGPGPGQANRTLGYIEYFWRIAWRFWRICKYKWKAHMY

SEQ ID NO: 32710 - protein, 17 aa, Homo sapiens
LYGSLGSVVAGFGLFFC

SEQ ID NO: 32711 - protein, 1148 aa, Homo sapiens
RTTPLFPPISSLHTHFPFAEERRGGGERRDRRKREKFLTEISFRGCGGEEEGKKRAGRPLLPPSLLSLSFSPFLTRPPTPPAAGDAARESAGPGSVSSAAAAAAAALRLGIPKRRTPFLSFSRSARLSAFVPRGRPARRLRPSPCVRPSRPASLGLRLSTRAFLRTRGPARPLRPQRLPFPSPPLLPPPSPTLPTPFSCPEARCACACVCPSANAATSARQMNSVRAANRRPRRVSRPRPVQQQQQQPPQQPPPQPPQQQPPQQQPPPPPQQQQQQQPPPPPPPPPPLPQERNNVGERDDDVPADMVAEESGPGAQNSPYQLRRKTLLPKRTACPTKNSMEGASTSTTENFGHRAKRARVSGKSQDLSAAPAEQYLQEKLPDEVVLKIFSYLLEQDLCRAACVCKRFSELANDPILWKRLYMEVFEYTRPMMHPEPGKFYQINPEEYEHPNPWKESFQQLYKGAHVKPGFAEHFYSNPARYKGRENMLYYDTIEDALGGVQEAHFDGLIFVHSGIYTDEWIYIESPITMIGAAPGKVADKVIIENTRDSTFVFMEGSEDAYVGYMTIRFNPDDKSAQHHNAHHCLEITVNCSPIIDHCIIRSTCTVGSAVCVSGQGACPTIKHCNISDCENVGLYITDHAQGIYEDNEISNNALAGIWVKNHGNPIIRRNHIHHGRDVGVFTFDHGMGYFESCNIHRNRIAGFEVKAYANPTVVRCEIHHGQTGGIYVHEKGRGQFIENKIYANNFAGVWITSNSDPTIRGNSIFNGNQGGVYIFGDGRGLIEGNDIYGNALAGIQIRTNSCPIVRHNKIHDGQHGGIYVHEKGQGVIEENEVYSNTLAGVWVTTGSTPVLRRNRIHSGKQVGVYFYDNGHGVLEDNDIYNHMYSGVQIRTGSNPKIRRNKIWGGQNGGILVYNSGLGCIEDNEIFDNAMAGVWIKTDSNPTLRRNKIHDGRDGGICIFNGGRGLLEENDIFRNAQAGVLISTNSHPILRKNRIFDGFAAGIEITNHATATLEGNQIFNNRFGGLFLASGVNVTMKDNKIMNNQDAIEKAVSRGQCLYKISSYTSYPMHDFYRCHTCNTTDRNAICVNCIKKCHQGHDVEFIRHDRFFCDCGAGTLSNPCTLAGEPTHDTDTLYDSAPPIESNTLQHN

SEQ ID NO: 32712 - protein, 60 aa, Homo sapiens
LYLLRCNILLLLLLLLLGSRCNFPSASLLLCLGTAKAWDRPRAASLCLPSSPRSIFPPLN

SEQ ID NO: 32713 - protein, 11 aa, Homo sapiens
LVLKIGVSFPR

SEQ ID NO: 32714 - skipped

SEQ ID NO: 32715 - protein, 304 aa, Homo sapiens
ISAAFSANERPRHHHAMPHASMNVPYIPAEKNIDLCKEMVDGLRITFDYTLPLVLLYPYEQAQYKKVTASKVFLAIKESATNTNRSQEKLSPSLRLLNPSRPQSTESQSTSGEPATPKRRKAEPQAVQSLRRSSPHTANCDRLSKSSTSPQPKRWQQDMSTSVPKLFLHLEKKTPVHSRSSSPTLTPSQEGSPVFAGFEGRRTNEINEVLSWKLVPDNYPPGDQPPPPSYIYGAQHLLRLFVKLPEILGKMSFTEKNLKALLKHFDLFVRFLAEYHDDFFPESAYVAASEVHYSTRNPQAVNKC

SEQ ID NO: 32716 - protein, 163 aa, Homo sapiens
VRLGMTTGRLQSGVNTLQGFKEDKRNKVTPVLYLNYGPYGSYAPHYDSTFANISKDDSDLIYSTYGEDSDLPSVFSIHEFLATCQDYPYVMADSLLDVLTKGGHSRTLQEMEMSLPEDEGHTKTLDTAKKNGDYRSRAPRAFGVQYSRQAHSAESSNKFWRSS

SEQ ID NO: 32717 - protein, 25 aa, Homo sapiens
IAATLSVIGYLSIMHCFTRGNGPFF

SEQ ID NO: 32718 - protein, 48 aa, Homo sapiens
KPSGSHEGGNTCGALVGGGAALQRSKKKFQKNEQQPPRPGIGAGDKGS

SEQ ID NO: 32719 - protein, 58 aa, Homo sapiens
LVATGQCSRCFMFTFSTFSFNCHNSEVDSVRDRLPQDHSAPANSMQLTLTLNTLQLHS

SEQ ID NO: 32720 - protein, 42 aa, Homo sapiens
ITTFESFPFSSLNPLSTFNAFNTFCSFNACRTCRSHVTSTVH

SEQ ID NO: 32721 - protein, 75 aa, Homo sapiens
IQFRRVTGAAVASQGAGSLSPALLPLAPSPRPRRAGLRGQGPSGEGYHLTWKKMSSLEKKHSNVIVQNSLNIHNR

SEQ ID NO: 32722 - protein, 193 aa, Homo sapiens
VKEFEDKKVELKENLIAELAEEKKMIENEMLTMELNGDSMQVRPIMTRKLRRRPNDPVPIPDKRRKPAPAQLNYLLTDEQIMEDLRTLNKLKSPKRPASPSSPEHLPATPAESPAQRFEARIEDGKLHYDKRWYHKSQAIYLESKDNQKLSCVISSVGANEIWVRKTSDSTKMRIYLGQLQRGLFVIHRRSAA

SEQ ID NO: 32723-32724 - skipped (2 entries)

SEQ ID NO: 32725 - protein, 8 aa, Homo sapiens
LCPFLPLI

SEQ ID NO: 32726 - protein, 12 aa, Homo sapiens
MYDFMSYTDANS

SEQ ID NO: 32727 - protein, 35 aa, Homo sapiens
LPRRPPFHIQQRRRGQPLRRFFTRCILVVTRLPRI

SEQ ID NO: 32728 - protein, 19 aa, Homo sapiens
MLSEVNSFRATGCKDLNTI

SEQ ID NO: 32729 - protein, 84 aa, Homo sapiens
KNFLPRLCRMKSFPAWQLFFHKRGLSQDLVATGSATAENVLPCGFLSSCPWPEVPALMAAPHLQLLCSPLPKPYGLPCICIHPV

SEQ ID NO: 32730 - protein, 20 aa, Homo sapiens
LASGMCLSGGGKTTLIGAEG

SEQ ID NO: 32731 - protein, 7 aa, Homo sapiens
IMNVECD

SEQ ID NO: 32732 - protein, 25 aa, Homo sapiens
MRVAVCPLIEARLSWKFQSCNDFFS

SEQ ID NO: 32733 - protein, 36 aa, Homo sapiens
RVAVCPLIEARLSWKFQSCNDFWLVPRGLLDCCVKS

SEQ ID NO: 32734 - protein, 9 aa, Homo sapiens
MGSIKWKIH

SEQ ID NO: 32735 - protein, 29 aa, Homo sapiens
ILGPTCCLTIPEPRPGIVAEHPRPAEVPP

SEQ ID NO: 32736 - protein, 15 aa, Homo sapiens
MPLRQFLSFLIVVSF

SEQ ID NO: 32737 - protein, 17 aa, Homo sapiens
IDASPRGSVPTLGASSP

SEQ ID NO: 32738 - protein, 6 aa, Homo sapiens
MRNPLC

SEQ ID NO: 32739 - protein, 6 aa, Homo sapiens
MLHICM

SEQ ID NO: 32740 - protein, 44 aa, Homo sapiens
LSEALYAWPTQTRNLRTKQPTLLLLWGFNGQGRLEKGCSAFPFS

SEQ ID NO: 32741 - protein, 34 aa, Homo sapiens
MRNLATKPLILSQRFGRNCFLSGSPEYPEESVWN

SEQ ID NO: 32742 - protein, 115 aa, Homo sapiens
MGLTPESPIVPPPMSPSSKSVSTPSEAGSQDSGDGAVGSRRGPIKLGMAKITQVDFPPREIVTYTKETQTPVMAQPKKDEEEDDDVVAPKLPIEPEEEKTLKKDEENDSKAPPMS

SEQ ID NO: 32743 - protein, 31 aa, Homo sapiens
ITRIFTCSYPDLGTRMGRPPVAMSPPRCSWG

SEQ ID NO: 32744 - protein, 38 aa, Homo sapiens
RWQDSELRYPQAMNSFLNERSSPCRTLRQEASADRCDL

SEQ ID NO: 32745 - protein, 4 aa, Homo sapiens
RKTK

SEQ ID NO: 32746 - protein, 7 aa, Homo sapiens
KLSFPIM

SEQ ID NO: 32747 - protein, 4 aa, Homo sapiens
LNVS

SEQ ID NO: 32748 - protein, 11 aa, Homo sapiens
IKSFKIINYFY

SEQ ID NO: 32749 - protein, 37 aa, Homo sapiens
LREGNNQMASLKPAFVNYFFLLLLEVSHLLLIINADV

SEQ ID NO: 32750 - protein, 256 aa, Homo sapiens
KESMAACTASGAPTGAPRSRKLLPRGLTTPWRRLERPIAETIDKRPAREDLLEETFGIRSAWISGLAEGVEVSKKCWHQGLSAGTLCPQFRGGIARGRVRVFMVAVGFMIAHFSVFRRFPISRGPSCALWFPAVTRAFSTQRMEGIYTHTHPSPSPQLWNKHSKSSILVGEMGNSYLSLTFILQTTYSFSRHGTHLVLFGFFFGFVVVVSVWAWFCLFLETRSRSVAQGWSAVARSWLTEASTSRAQAILLPQPPG

SEQ ID NO: 32751 - protein, 35 aa, Homo sapiens
IEDHDSQEVMRRPGTTSPGMHRRRVREFSPSQLDY

SEQ ID NO: 32752 - protein, 27 aa, Homo sapiens
IVFKQPISCVKEEIQETQTPTHSQKKR

SEQ ID NO: 32753 - protein, 89 aa, Homo sapiens
ITSANSQTVMDSQEHSDCINKGHRLFLSRLSFSLCHTSGAKLCRLGLFWDFLVYQGVLSVFCVWDISKCICQQQKKTNKNAGWMLKDKK

SEQ ID NO: 32754 - protein, 54 aa, Homo sapiens
VQSASVSKAGKGSSSSHGVAAALNQDLDPDPKCHVFNVSSQRCQMGSAQPCLCC

SEQ ID NO: 32755 - protein, 76 aa, Homo sapiens
RVLPIKGSHVEFGMWKGGRSHPFLPCSSRRAGSGGQLDSILPHQSPAWGPWGCKDLSSGVPSFLTSSILWKSAVVK

SEQ ID NO: 32756 - protein, 31 aa, Homo sapiens
LPSARPAAHQPSCRTPRSTRSWMGSFRTSKP

SEQ ID NO: 32757 - protein, 429 aa, Homo sapiens
IKQQERINSQREEIERQRKMLAKRKPPAMGQAPPATNEQKQWKSKTNGAENETLTLKEYHEQEEIFKLRLGHLKKEEAEIQAELERLERVRKLHIREVKRIHNEDNSQFKYHPTLNDRYLLLHLLGRGGFSEVYKAFDLTEQRYVAVKIHQLNKNWRDEKKENYHKHACREYRIHKELDHPRIVKLYDYFSLDTDSFCTVLEYCEGNDLDFYLKQHKLMSEKEARSIIMQIVNALKYLNEIKPPIIHYDLKPGNILLENGTGCGEIKITDFGLSKIMDDDSYNSVDGMELTSQGAGTYWYLPPECFVVGKEPPKISNKVDVWSVGVIFYQCLYGRKPFGHNQSQQDILQENTILKATEVQFPPKPVVTPEAKALIRRCLAYRKEDRIDVQQLACDPYLLPHIQKSVSTSSPAGAAIASTSGASNNSSSN

SEQ ID NO: 32758 - protein, 13 aa, Homo sapiens
RNQIYFKRLHMVI

SEQ ID NO: 32759 - protein, 127 aa, Homo sapiens
LGPRGAANHTGLRPSYPAPSPSTSTFTSPPFHFFLYVFFLLETDSIHIEYNIFVYLTGRGRGGDRGGAGPAAWYSSPRGHWEGDPRPLPSPLCTVLWKRNTHLVSKEFILRRVCVCVCLFFLLNLFK

SEQ ID NO: 32760 - protein, 54 aa, Homo sapiens
KNAATNRRRKRQKCVFHLEHPEGAQPYQHLDFDPVTLILDLWPPELLENKFALF

SEQ ID NO: 32761 - protein, 412 aa, Homo sapiens
IPLYFVDLQDDLDDYGFEDYGTDCDNMRVTAFLDIPGQDNLPPLTRLEKYAFSENTFNRQIIARGLLDIFRDFGNNEEDFLTVMEIVVRLSEDAEPTVRTELMEQIPPIAIFLQENRSNFPVVLSEYLIPIVVRYLTDPNNQIICKMASMLSKSTVERLLLPRFCELCGDRKLFQVRKVCAANFGDICHAVGQEATEKFLIPKFFELCSDAVWGMRKACAECFTAVSHSSSPGVRRTQLFPLFIRLVSDPCRWVHQAAFQSLGPFTSTFANPSRAGLYLREDGALSIWPLTQDLDSGFASGSPAPSSGGNTSPASLTRSAKPVRSEPELPVEGTSAKTSDCPHSSSSSDGPAESPVESCVSAGAEWTRVSPETSACSKLSDMNDLPISSYPGSDSWACPGNTEDVFSHFLYW

SEQ ID NO: 32762 - protein, 195 aa, Homo sapiens
LWPCPVCRVEGEAGAGWESRSKFFHPKPVPGFQVAYVVFQKPSGVSAALALKGPLLVSTESHPVKSGIHKWISDYADSVPDPEALRVEVDTFMEAYDQKIAEEEAKAKEEEGVPDEEGWVKVTRRGRRPVLPRTEAASLRVLERERRKRSQKELLNYAWQHRESKMEHLAQLRKKFEEDKQRIELLRAQRKFRPY

SEQ ID NO: 32763 - protein, 43 aa, Homo sapiens
LEIGCFVKIYLLVCFKVDSILYIYKKKSNFVLYFVCACDVFLE

SEQ ID NO: 32764 - protein, 68 aa, Homo sapiens [sequence omitted]

SEQ ID NO: 32765 - protein, 23 aa, Homo sapiens
MISNVFVIYLTNCLICYVNVFMN

SEQ ID NO: 32766 - protein, 25 aa, Homo sapiens
TLRSGYLLPDTKAYGDRIERILRSV

SEQ ID NO: 32767 - protein, 283 aa, Homo sapiens
KWPFQPSRDMRLVQFWAPHLVGPHLGLETGNGRGIINLNAFDPTLPKTMTQFLEQGEATLSVARRALAAQLPVLPRSEVTFLAPVTWPDKVVCVGMNYVDHCKEQNVPVPKEPIIFSKFASSIVGPYDEVVLPPQSQEVDWEVELAVVIGKKGKHIKATDAMAHVAGFTVAHDVSARDWLTRCNGKQWLLGKTFDTFCPLGPALVTKDSVADPHNLKICCRVNGEVVQSSNTNQMVFKTEDLIAWVSQFVTFYPGDVILTGTPPPPPRCRCIQETSCLSQEGG

SEQ ID NO: 32768 - protein, 14 aa, Homo sapiens
LKGILMLTTSPRRA

SEQ ID NO: 32769 - protein, 799 aa, Homo sapiens
VTLQALGEDEITLESVLRGKFAAGKNGLACLACGPQLEVVNSITGERLSAYRFSGVNEQPPVVLAVKEFSWQKRTGLLIGLEETEGSVLCLYDLGISKVVKAVVLPGRVTAIEPIINHGGASASTQHLHPSLRWLFGVAAVVTDVGQILLIDLCLDDLSCNQNEVEASDLEVLTGIPAEVPHIRESVMREGRHLCFQLVSPTGTAVSTLSYISRTNQLAAGFSDGYLALWNMKSMKREYYIQLESGQVPVYAVTFQEPENDRRNCCYLWAVQSTQDSEGDVLSLHLLQLAFGNRKCLASGQILYEWLEYCEERYTLDLTGGMFPLRGQTSNTKLLGCQSIEKFRSHGDREEGVNEALSPDTSVSVFTWQVNIYGQGKPSVYLGLFDINRWYHAQMPDSLRSGEYLHNCSYFALWSLESVVSRTSPHGILDILVHERSLNRGVPPSYPPPEQFFNPSTYNFDATCLLNSGVVHLTCTGFQKETLTFLKKSGPSLNELIPGGYNRRLVAGLLSPSFVDVQPSSLSQEEQLEAILSTAIQTSSLGLLTGYIRRWITEEQPNSATNLRFVLEWTWNKVVLTKEEFDRLCVPLFDGSCHFMDPQTIQSIQQCYLLLSNLNIVLSCFASEAREITERGLIDLSNKFVVSHLICQYAQVVLWFSHSGLLPEGIDDSVQLSRLCYNYPVIQNYYTSRRQKFERLSRGKWNPDCLMIDGLVSQLGERIEKLWKRDEGGTGKYPPASLHAVLDMYLLDGVTEAAKHSITIYLLLDIMYSFPNKTDTPIESFPTVFAISWGQVKLIQGFG

SEQ ID NO: 32770 - protein, 210 aa, Homo sapiens
LETEQVGRNYMKEKKAAVKEFEDKKVELKENLIAELAEEKKMIENEMLTMELNGDSMQVRPIMTRKLRRRPNDPVPIPDKRRKPAPAQLNYLLTDEQIMEDLRTLNKLKSPKRPASPSSPEHLPATPAESPAQRFEARIEDGKLHYDKRWYHKSQAIYLESKDNQKLSCVISSVGANEIWVRKTSDSTKMRIYLGQLQRGLFVIHRRSAA

SEQ ID NO: 32771 - protein, 26 aa, Homo sapiens
VCRGPRGPGVGWAGGQARPRRPLQLG

SEQ ID NO: 32772 - protein, 12 aa, Homo sapiens
LLKAHGHDCTPH

SEQ ID NO: 32773 - protein, 11 aa, Homo sapiens
VGNVRPDCHMY

SEQ ID NO: 32774 - protein, 29 aa, Homo sapiens
IPSVAARLFLGTCAGMRPACVNTPSEEWS

SEQ ID NO: 32775 - protein, 116 aa, Homo sapiens
VDFLAERMLAVPVTCGDTARSALQPDLLARRRLKRCPSRWLCLSAAWSFVQVFSEPDGFTVIFSGLGNNAGGTMHWNDTRPAHFRILKVVLREAVAECLMDSYSLDVHGGRRTAAG

SEQ ID NO: 32776 - protein, 24 aa, Homo sapiens
RDAWFPPKRTGMGSDFNEIELQLD

SEQ ID NO: 32777 - protein, 27 aa, Homo sapiens
LKPAFVNYFFLLLLEVSHLLLIINADV

SEQ ID NO: 32778 - protein, 31 aa, Homo sapiens
ICFPFQVFLMTVCLYLTVSCFSNSMGLLSNR

SEQ ID NO: 32779 - protein, 136 aa, Homo sapiens
ISRGPSCALWFPAVTRAFSTQRMEGIYTHTHPSPSPQLWNKHSKSSILVGEMGNSYLSLTFILQTTYSFSRHGTHLVLFGFFFGFVVVVSVWAWFCLFLETRSRSVAQGWSAVARSWLTEASTSRAQAILLPQPPG

SEQ ID NO: 32780 - protein, 48 aa, Homo sapiens
KQTGKWSHLFPPSADEAQPHFSRGPRQEAIYLRQILSFFLSPIFSGSL

SEQ ID NO: 32781 - protein, 22 aa, Homo sapiens
IKNNFGHRGVGGRGGRMREFSM

SEQ ID NO: 32782 - protein, 71 aa, Homo sapiens
INKGHRLFLSRLSFSLCHTSGAKLCRLGLFWDFLVYQGVLSVFCVWDISKCICQQQKKTNKNAGWMLKDKK

SEQ ID NO: 32783 - protein, 63 aa, Homo sapiens
MWKGGRSHPFLPCSSRRAGSGGQLDSILPHQSPAWGPWGCKDLSSGVPSFLTSSILWKSAVVK

SEQ ID NO: 32784 - protein, 7 aa, Homo sapiens
IITCLMK

SEQ ID NO: 32785 - protein, 49 aa, Homo sapiens
KFFSSALEVPSRFPGSSVPLPQTHGHNQPRSSWSESRECGGVGGVSGKA

SEQ ID NO: 32786 - protein, 248 aa, Homo sapiens
TVMEIVVRLSEDAEPTVRTELMEQIPPIAIFLQENRSNFPVVLSEYLIPIVVRYLTDPNNQIICKMASMLSKSTVERLLLPRFCELCGDRKLFQVRKVCAANFGDICHAVGQEATEKFLIPKFFELCSDAVWGMRKACAECFTAVSHSSSPGVRRTQLFPLFIRLVSDPCRWVHQAAFQSLGPFTSTFANPSRAGLYLREDGALSIWPLTQDLDSGFASGSPAPSSGGNTSPARYALARVTTRTLDVP

SEQ ID NO: 32787 - protein, 127 aa, Homo sapiens
KPKIVKKRTKKFIRHQSDHYVKIKRNWWKPRGIDNRVRRRFRVQILMPNTGYGSNKKTKHMLPSGFRKFLVHNVKELEVLLMCNNRTCAEIAHNVSSKNRKAIVERAAQLAITVTNPSARLCSEENE

SEQ ID NO: 32788 - protein, 58 aa, Homo sapiens
RPRHRLTERACGTCAATTTRARPGLTPSRACTAATWGRTGASSAGMTSTPTTARITSP

SEQ ID NO: 32789 - protein, 16 aa, Homo sapiens
LPSVSVSTAAIPRCWS

SEQ ID NO: 32790 - protein, 200 aa, Homo sapiens
VDNDENERQLSLRTVSLGAGAKDELHIVEAEAMNYEGSPIKVTLATLKMSVQPTVSLGGFETTPPVVLRLKCGSGPVHISGQHLVAVEEDAESEDEEEEDVKLLSISGKRSALGGSSKLPQKKVKLAADEDDDDDEEDDDDEDDDDDFNEEAEEKVPVKQSIQDTPAKNAQKSNQNGKDSKPSTPRSKGQESFKKQEKNS

SEQ ID NO: 32791 - protein, 89 aa, Homo sapiens
LIPQPAVRNPCRIHETLPIAAGGHFALELTTPEQGRDSPDAGRLFCPFGDTSPPLPGPASLKGSPCSCLDAGFFSGSGKPASRDDAPQR

SEQ ID NO: 32792 - protein, 114 aa, Homo sapiens
KFDPNEIKVIYLRCTGDATSALAPKIGPLGLSPKNVGGDIAKATGDWKGLRITVKLTIQNRQAQIEVVPSASALIIKALKEPPETERNRKTLNTVGISLLMRSSTLLDRWSTDP

SEQ ID NO: 32793 - protein, 215 aa, Homo sapiens
RRLDIAGRDITRYLIKLLLLQGYTFNHSADFETVRMIKEKLCYVGYNIVQEQKLALETTVLVESYTLPDGGIIKVGGERFETPEALFQPHLINVEGVGVAELLFNTIQAADIDTRSEFYKHIVLSGGSTMYPGLSSRLKRELKQLYLERVLKDDAEKLPKFKICIEDPSRRKHMVFLGGAVLADIMKDKDNFWMTRQEYQEKGVLVLEKLGVTVR

SEQ ID NO: 32794 - protein, 60 aa, Homo sapiens
LKLERLKENKLSGLLRKQKKAKQASKKTAMAAAKAPTKAAPKQKTVKVVKVSAPQVGGKR

SEQ ID NO: 32795 - protein, 20 aa, Homo sapiens
ILSSVIEKRIWDLRRYLLIF

SEQ ID NO: 32796 - protein, 367 aa, Homo sapiens [sequence omitted]

SEQ ID NO: 32797 - protein, 34 aa, Homo sapiens
MGFRLNSQETFPSHDGCCWACPMYDFMSYTDANS

SEQ ID NO: 32798 - protein, 57 aa, Homo sapiens
MGPRAGRARGGRDEEGRRRAASKDVPRDPRHLPVDFLAERMLAVPVTCGDTARSALH

SEQ ID NO: 32799 - protein, 264 aa, Homo sapiens
MQSELGESSAAINKRLCKSSIEFSENSLLPASSVLTGTRSLLQPHLERVAIDALQLCRLLLPPPNCRKLQLLMRMISQMSQNVDMSKLHDAMGMKSPMIHTFSRCVLCCAEKVDLDKLLAGRLVSFLLDHHQEILQVPTYLQTAVEKHLEYLKKGHIENPGDGLFVPLPTYSYCKQISAQDFEKQKVSTSQAAVTELIENVIKNKSLPLKEKRKKLKQFQKEYPLIYQKRFPTTEIEAALFGDKPTIKQPMLILRKPKFCSLRY

SEQ ID NO: 32800 - protein, 5 aa, Homo sapiens
IRVLL

SEQ ID NO: 32801 - protein, 32 aa, Homo sapiens
KTSMMSHLHLMTVSHWPATCSSLCLPDYNNSM

SEQ ID NO: 32802 - protein, 67 aa, Homo sapiens
KKSRVLAPVGLRVEAGGVWVPSSSDRWMDLSSKRKEETRWQISLKPKIACEAIIRRNKNRHKNRGKE

SEQ ID NO: 32803 - protein, 222 aa, Homo sapiens
VARRALAAQLPVLPRSEVTFLAPVTWPDKVVCVGMNYVDHCKEQNVPVPKEPIIFSKFASSIVGPYDEVVLPPQSQEVDWEVELAVVIGKKGKHIKATDAMAHVAGFTVAHDVSARDWLTRCNGKQWLLGKTFDTFCPLGPALVTKDSVADPHNLKICCRVNGEVVQSSNTNQMVFKTEDLIAWVSQFVTFYPGDVILTGTPPPPPRCRCIQETSCLSQEGG

SEQ ID NO: 32804 - protein, 24 aa, Homo sapiens
IEYFWRIAWRFWRICKYKWKAHMY

SEQ ID NO: 32805 - protein, 53 aa, Homo sapiens
KGGNGPLRGALKSAVGGEGPGHTPSPPDSSPSGSAQPWTLDLDKKREAALWWI

SEQ ID NO: 32806 - protein, 8 aa, Homo sapiens
MSYTDANS

SEQ ID NO: 32807 - protein, 399 aa, Homo sapiens
KGQADFFFLLVSEAVVATGSPRAWLTCLILPLPGIIFSVLPKAMSRPLLITFTPATDPSDLWKDGQQQPQPEKPESTLDGAAARAFYEALIGDESSAPDSQRSQTEPARERKRKKRRIMKAPAAEAVAEGASGRHGQGRSLEAEDKMTHRILRAAQEGDLPELRRLLEPHEAGGAGGNINARDAFWWTPLMCAARAGQGAAVSYLLGRGAAWVGVCELSGRDAAQLAEEAGFPEVARMVRESHGETRSPENRSPTPSLQYCENCDTHFQDSNHRTSTAHLLSLSQGPQPPNLPLGVPISSPGFKLLLRGGWEPGMGLGPRGEGRANPIPTVLKRDQEGLGYRSAPQPRVTHFPAWDTRAVAGRERPPRVATLSWREERRREEKDRAWERDLRTYMNLEF

SEQ ID NO: 32808 - protein, 34 aa, Homo sapiens
LVCPPLLPFPPGPRPLPPQVPSAAIRPLYPPIPR

SEQ ID NO: 32809 - protein, 51 aa, Homo sapiens
LGNNAGGTMHWNDTRPAHFRILKVVLREAVAECLMDSYSLDVHGGRRTAAG

SEQ ID NO: 32810 - protein, 82 aa, Homo sapiens
KAIKKFVIRNIVEAAAVRDISEASVFDAYVLPKLYVKLHYCVSCAIHSKVVRNRSREVRKDRTPPPRFRPAGAAPRPPPKPM

SEQ ID NO: 32811 - protein, 54 aa, Homo sapiens
RLRPGASWPREPRDGGPGRGGGAAGVSLGGEGAAGPARFPARKLREAWTSAHWR

SEQ ID NO: 32812 - protein, 24 aa, Homo sapiens
RDAWFPPKRTGMGSDFNEIELQLD

SEQ ID NO: 32813 - protein, 25 aa, Homo sapiens
KDFRNGSNSRSRVITNLMFLHWTLS

SEQ ID NO: 32814 - protein, 44 aa, Homo sapiens
KWSHLFPPSADEAQPHFSRGPRQEAIYLRQILSFFLSPIFSGSL

SEQ ID NO: 32815 - protein, 19 aa, Homo sapiens
LFYNSFVCCCVFRTVPGTQ

SEQ ID NO: 32816 - protein, 31 aa, Homo sapiens
LIEYLHNALEHDMRLRFNNDRMKTTIKETST

SEQ ID NO: 32817 - protein, 74 aa, Homo sapiens
LAPTRLLSGHWVSLCWTLSVSGPPRHGWDVLAVCPALFSRPSGAWWGCTPLPGRTPFPWVCTPRRLFIRLPTGT

SEQ ID NO: 32818 - protein, 57 aa, Homo sapiens
KTGKNAATNRRRKRQKCVFHLEHPEGAQPYQHLDFDPVTLILDLWPPELLENKFALF

SEQ ID NO: 32819 - protein, 33 aa, Homo sapiens
RWRSCIFETTSGWLGRTVMPHSIRNYATAEEVY

SEQ ID NO: 32820 - protein, 39 aa, Homo sapiens
MIQRSHASVPAAGAQIFLQGLEDRKLLGYKSKSTAENVY

SEQ ID NO: 32821 - protein, 146 aa, Homo sapiens
MGVLFITVELSQGWVGHWAQQRGRKSRTPDIPLSFLWRGGSALFSLYVALPCSWGSGLLSWRGCLSICNWAHLFASWPFLFLLCLQYHEPPEDIKALSWNRQAQHILSSAHPSGKAVVWDLRKNEPIIKVSDHSNRGDLVSVMEPG

SEQ ID NO: 32822 - protein, 34 aa, Homo sapiens [sequence omitted]

SEQ ID NO: 32823 - protein, 24 aa, Homo sapiens
IFQDFQVFDAVMLRVHYPRLFIQE

SEQ ID NO: 32824 - protein, 124 aa, Homo sapiens
LWLCLFPVSARLLCKKKDGTKKGRVNGAQTYGLKACALPICCLAPSETRAKICPGLECFPEWLELEPGTRSSLIEVQFMCLWVWMAQSVSGLRKADLAPTLTLTDPGIYSRNWKPSATGAWRSS

SEQ ID NO: 32825 - protein, 19 aa, Homo sapiens
LLLVTFLSMDDLLGYGESA

SEQ ID NO: 32826 - protein, 10 aa, Homo sapiens
IEEMQADLLS

SEQ ID NO: 32827 - protein, 24 aa, Homo sapiens
VSQLLVHVMIFSVTNDVMILPNEI

SEQ ID NO: 32828 - protein, 71 aa, Homo sapiens
LAPETTNSSLKFSNSNNGISDLAFLYFSHVNKIGSASTMGYMLSYRQGLALLPRLESGGLTTAHCSLDLPR

SEQ ID NO: 32829 - protein, 53 aa, Homo sapiens
LALFFSFPISDLFQGESGFGGRGRKVGLQDQPPPTTIKTTRIFFCKFLTALNS

SEQ ID NO: 32830 - protein, 131 aa, Homo sapiens
LLRMSEHRNEALGNYLEMRLKSSFLRGLGSWKSNPLRLGGWTILLTLTMGQGEPGGPQGDPWVPHELLLPSLCDSSHASSWGSGSITCAWRGGDSSSHPLVSGHILSNSPVAAVMCSSMGTHLSPFKGTLL

SEQ ID NO: 32831 - protein, 58 aa, Homo sapiens
IKRISGECGSSFPQVVGSLFLSPGGPKFIHLMYHFARFVAMEYIKSNSKNYQLSRYET

SEQ ID NO: 32832 - protein, 66 aa, Homo sapiens
ILSCPGPAAGLPPPSPLGLSGWISPPLLLPRRSTEGAAKRAVSANPASLCGGLCHRAMGPEVPGPG

SEQ ID NO: 32833 - protein, 699 aa, Homo sapiens
IVEIKQLFCRLDYKDTIAVARFIVFLASSSTSRDGKPCIFLKAFEDLKSTVYVYVKSLRDFSTESMSLVPATNYIYTPLNQLKGGTIVNVYGVVKFFKPPYLSKGTDYCSVVTIVDQTNVKLTCLLFSGNYEALPIIYKNGDIVRFHRLKIQVYKKETQGITSSGFASLTFEGTLGAPIIPRTSSKYFNFTTEDHKMVEALRVWASTHMSPSWTLLKLCDVQPMQYFDLTCQLLGKAEVDGASFLLKVWDGTRTPFPSWRVLIQDLVLEGDLSHIHRLQNLTIDILVYDNHVHVARSLKVGSFLRIYSLHTKLQSMNSENQTMLSLEFHLHGGTSYGRGIRVLPESNSDVDQLKKDLESANLTANQHSDVICQSEPDDSFPSSGSVSLYEVERCQQLSATILTDHQYLERTPLCAILKQKAPQQYRIRAKLRSYKPRRLFQSVKLHCPKCHLLQEVPHEGDLDIIFQDGATKTPDVKLQNTSLYDSKIWTTKNQKGRKVAVHFVKNNGILPLSNECLLLIEGGTLSEICKLSNKFNSVIPVRSGHEDLELLDLSAPFLIQGTIHHYGCKQCSSLRSIQNLNSLVDKTSWIPSSVAEALGIVPLQYVFVMTFTLDDGTGVLEAYLMDSDKFFQIPASEVLMDDDLQKSVDMIMDMFCPPGIKIDAYPWLECFIKSYNVTNGTDNQICYQIFDTTVAEDVI

SEQ ID NO: 32834 - protein, 5 aa, Homo sapiens
RTAAG

SEQ ID NO: 32835 - protein, 14 aa, Homo sapiens
LEYFEIGELRPSVG

SEQ ID NO: 32836 - protein, 35 aa, Homo sapiens
KGNNQMASLKPAFVNYFFLLLLEVSHLLLIINADV

SEQ ID NO: 32837 - protein, 17 aa, Homo sapiens
RKHTSRLPCQQGAANKR

SEQ ID NO: 32838 - protein, 8 aa, Homo sapiens
LEGWKVGK

SEQ ID NO: 32839 - protein, 37 aa, Homo sapiens
MSYWAPVCRIYAHVGTEESSVVAHLIIYPGEFSCLPG

SEQ ID NO: 32840 - protein, 430 aa, Homo sapiens
MSKTEGKLENCWRKYAVEGVKNSFSQKSNFREITMRYVKTLSRENGQKFNAVGENCITDSNPAKHLRGSREESLHPSVSSVENLQQHEDLINLQSFQLGERAYQTDVLVKVPRQSSVLSENQRMNNPERWFESTGCGKTYNQNRAFNQHQRFHSGEKTYEHNECGKAFSWPSILSKHQRIHTGKKLYTCEDCGKSFSVHSYFIQHCKIHTREKPYECIKCGKAFSTHSSYVQHLKIHTGEKHHECNQCGKAFSHSSNLIHHQRIHSGEKPYKCKECGKAFNRQSNLIQHQRIHSGEKPYDCKECGKAFSTQLFLIQHQRIHTGEKPYECNECAKSFSLNRTLTVHQRIHTGEKPYRCNECGKSFSQCSQVIQHKRIHTGEKPYICNECGKSFGARLSLIQHQRIHTGEKPYGCSVCGKTFSQKGHLIQHQ

SEQ ID NO: 32841 - protein, 6 aa, Homo sapiens
TASRWW

SEQ ID NO: 32842 - protein, 39 aa, Homo sapiens
IAPYGQLCPQGRMRIATEVLKSKPNSSHWHTGIRQKAGS

SEQ ID NO: 32843 - protein, 5 aa, Homo sapiens
ICILP

SEQ ID NO: 32844 - protein, 25 aa, Homo sapiens
LSKEVVLKSKPNRFPSFRKTLERAS

SEQ ID NO: 32845 - protein, 37 aa, Homo sapiens
VKTRMKTSMMSHLHLMTVSHWPATCSSLCLPDYNNSM

SEQ ID NO: 32846 - protein, 7 aa, Homo sapiens
KWKAHMY

SEQ ID NO: 32847 - protein, 58 aa, Homo sapiens
VWKNALECDISARMLKYRFPAGTMALSSVAQWSSSEDAKIHEKTSRTSGRIFNGKSLG

SEQ ID NO: 32848 - protein, 9 aa, Homo sapiens
MFCFACPPI

SEQ ID NO: 32849 - protein, 78 aa, Homo sapiens
IHETLPIAAGGHFALELTTPEQGRDSPDAGRLFCPFGDTSPPLPGPASLKGSPCSCLDAGFFSGSGKPAASRDDAPQR

SEQ ID NO: 32850 - protein, 77 aa, Homo sapiens
IHETLPIAAGGHFALELTTPEQGRDSPDAGRLFCPFGDTSPPLPGPASLKGSPCSCLDAGFFSGSGKPASRDDAPQR

SEQ ID NO: 32851 - protein, 19 aa, Homo sapiens
LRCGMQHFGRKIEDVFKKT

SEQ ID NO: 32852 - protein, 23 aa, Homo sapiens
LLRYLKCGMQHFGRKIEDVFKKT

SEQ ID NO: 32853 - protein, 85 aa, Homo sapiens
ILYGSLGSVVAGFGHFLFTSRIRRSCDVGVGGFILVTLGCWFHCRYNYARQRIQERIAREEIKKKILYEGTHLDPERKHNGGSSN

SEQ ID NO: 32854 - protein, 45 aa, Homo sapiens
LARTPSGTGAAFILGRVFPVEAEKYSTVQLWFIFSHLRRTSEELE

SEQ ID NO: 32855 - protein, 21 aa, Homo sapiens
ISITLRFLLLMRTLSAYAKKF

SEQ ID NO: 32856 - protein, 59 aa, Homo sapiens
LFGFFFGFVVVVSVWAWFCLFLETRSRSVAQGWSAVARSWLTEASTSRAQAILLPQPPG

SEQ ID NO: 32857 - protein, 12 aa, Homo sapiens
LLTSDELNTAPV

SEQ ID NO: 32858 - protein, 14 aa, Homo sapiens
LSRTLLFFSESVLR

SEQ ID NO: 32859 - protein, 21 aa, Homo sapiens
LILKLKKLSWKTERPSPDDIV

SEQ ID NO: 32860 - protein, 46 aa, Homo sapiens
TGKWSHLFPPSADEAQPHFSRGPRQEAIYLRQILSFFLSPIFSGSL

SEQ ID NO: 32861 - protein, 39 aa, Homo sapiens
LSPLPTLPPLTLLLTLLEPCLPGGPISSGRPCLWATWSV

SEQ ID NO: 32862 - protein, 8 aa, Homo sapiens
KSFEVTVA

SEQ ID NO: 32863 - protein, 408 aa, Homo sapiens
LAELQGFQIERKIYECNQIEKSVTRGSSVSLLQTNLPCVNTSISNIYRNDFMHPSLLTQDQKAYIREKPYKCSDCGKAFNQRSNLTTHQRIHTGQKPHKCDICGKGFRRIANLASHHRIHTGEKPYRCNECGKTFNQTFNLTTHQRIHTGQKPYKCDRCGKGFRQIGNLASHHRIHTGEKPYRCNECGKTFNRMFHLTRHQRIHTGQKPYKCDICGKGFRQIANLASHHRIHTGEKPYKCSDCGKTFNYRSHLTRHQRIHTGQKPYKCDTCGKDFSQNSYLENHQRIHTREKSYRCNECGKTFNKMTNLTTHQRIHTGQKTYKCDICGKGFRQIGNLASHHRIHTGEKPYRCNECGKTFNRMFHLTRHQRIHTGQKPYKCDICGKSFSQNSYLENHQRIHTGEKTYKL

SEQ ID NO: 32864 - protein, 124 aa, Homo sapiens
RGAANHTGLRPSYPAPSPSTSTFTSPPFHFFLYVFFLLETDSIHIEYNIFVYLTGRGRGGDRGGAGPAAWYSSPRGHWEGDPRPLPSPLCTVLWKRNTHLVSKEFILRRVCVCVCLFFLLNLFK

SEQ ID NO: 32865 - protein, 1852 aa, Homo sapiens
IGYKIENKILAMEEALNWIKYAGDVTILTKLGSIDNCWPMLSIFFTEYKYHITKIVMEDCNLLEELKTQSCMDCIEQGELMKMKGNEEFSKERFDIAIIYYTRAIEYRPENHLLYGNRALCFLRTGQFRNALGDGKRATILKNTWPKGHYRYCDALSMLGEYNWALQANITAQKLCKNDPEGIKDLIQQHVKLQKQIEDLQGRTANKNPIKAFYENRAYTPRSLSAPVFSTSLNFVEKERDFRKINHEMANGGNQNLKVMDEALMVDDCDCHPEFSPPSSQPPKHKGKQKSRNNESEKFSSSSQLTLPADLKNILEKQFSKSSRGAHQDFANIMTMLRSLIQDGYTALLEQRCRSAAHAFTELLNGLDPQKIKQLNLAMINYVLVVYGLAISLLGIGQPEELSEAENQFKRIIEHYHNEGLDCLAYCGIGKVYLKKNRFLEALNHFEKARTLIYRLPGVLTWPTSNVIIEESQPEKIKMLLEKFVEECKFPPVPDAICCYQKCCGYSKIQIYITDPDFKGFIRISCCQYCKIEFHMNCWKKLKTTTFNDKIDKDFLQGICLTPDCEGVISKIIIFSSGGQVKCEFEHKVIKEKVPPRPILKQKCSSLEKLRLKEDKKLKRKIQKKEAKKLAQERMEEDLRESNPPKNEEQKETVDNVQHCQFLDDRILQCIKQYADKIKSGIWNTATLLKELLSWKVLSTEDYTTCFSSRNFLNEAVDYVIRHLIQEKNRVKTRIFLHVLSELKEVEPKLAAWIRKLNSFGLDATGPFFSRYEASLKQLDFSIMTFLWNEKYGHKLDSIEGKQLDYFFEPTSSKEARCLIWLLEEHRDKFPALHSALDEFFDIMDSRCTVLRKQDSGEAPFSSTKVKNKGKKKKPKDSKPMLVGSGTTSVTPNNEIITSSEDHSNQNSDTAGPFAVPDHLRQDVEEFEALYDQHSNEYVVRNKKLWDMNPKQKCSTLYDYFSQLLEEHGPLDMSHKMFSEEYEFFPEETRPILEKAGGLKSFLLGCPRFVVIDNCIALKKVASRLKKKRKKKNIKTKVEDISKAGEYLQVKLPLNSAAREFKPDVKSKPVSGSSSAPASEDVKPKPLSANSPKPACEDVKAKPVSDNSSRQVSEDGKPKGFSSNSPKPGSEDANYKRVSSNSPKPVLEDVKPTYWAQSHLVTGYCTYLPFQRFDNTRTSPAYINVLPGLPQYTSIYTPLVSLSPEYQLPRSVPVVPSFVANDRADKNATAYFEGHHLNAENAAGHQIASETQILEDSSLISVKSQCSTGDAHTVLSESNRKDGHCGNSNNKCEVIPESTSAVTNIPQVQMVAIQVSWNITHQEVNTEPYNPFEKQQGEISRIEKEYQVLQDQLKEAYENYEQIKLKGLEETRDLEEKLKRHLEENKISKTELDWLLQDLEREIKKWQEEKKEIQKTLKSLKKKIKKVSNANEMYTQKNDGNDKEHELHLDQSLEISNTLTNEKMKIEECIKKGKKDYEESHQRAVAAEVSVLENWKESEVYKLQIMQSQAEAYLKKLELISHDPAAYPDMESDICSWELFLSNVTKETEKAKYQFEEQIKAIKNGSRLSELSKVQISELSFPACNTVHPELLPESSGHDDQGFMTSASDVTGNQAALHRDPSVFSAGDSPGEAPSALLPGPPPSQPEATQLPGPKGAGQAALSEQSPAADQKQPVPPGCAACSSQSPKKPFNSIIEHLSVVFPCYNSTELAGFIKKVRSKNKNSLSGLSIDEIVQRVTEHILDEQKKKKPNPGKDKRTYEPSSAAHVTRSSQGPPLAVVAPSPKTKGQKAEDVPVRVALGASSCEICHEVFKSKNVRVLKCGHKYHKGCFKQWLKGQSACPACQTCDLLSEE

SEQ ID NO: 32866 - protein, 312 aa, Homo sapiens
MGSAGEQVGFNKPGGPMDEGPDLDLGPPVDPDEDSDNSAIYVQGLNDNVTLDDLVDFFKQCGVVKMNKRTEQPMIHTYLDKETRKPKGDATVSCEDSPTAKAAVEWFDGKDFQGSKLKVSLARKRPPVNSMQGGMPPHEGRGMPPPLCGGPGGPGSPGGPMGHMGGRGGDRGGLPPRGPQGSRGNTSGGGNVQHQAGDRQCPNPGCGNQNFAWRTESNKCKAPKPEGFLPPPFPPPGGDHGRGGPGGMWGGRGGLMDHGGPGGMFRGGCGRDRSGFCGGWAWTEVALVEEDKVALGGPRTFDVTNGRKKRRT

SEQ ID NO: 32867 - protein, 10 aa, Homo sapiens
MKPFRILNCI

SEQ ID NO: 32868 - protein, 71 aa, Homo sapiens
MRVPGGGARAAAAGPWGRRCCRSCARGCGPRSPAVGSSTRTRAPSPTASTSMSGSSCSSFPSYCTWSCLPA

SEQ ID NO: 32869 - protein, 90 aa, Homo sapiens [sequence omitted]

SEQ ID NO: 32870 - protein, 66 aa, Homo sapiens
MAFSPDPTSFPGTHTPSCPQPSACVVPDGSRSPSAAFPLPFLLVRNNGKVKRKEDYKQDGGRGTYT

SEQ ID NO: 32871 - protein, 423 aa, Homo sapiens [sequence omitted]

SEQ ID NO: 32872 - protein, 171 aa, Homo sapiens
MGPCGIRPQLFKGHNFQPSKQSSNYERGFLLSLKRFAGLRSQHGYLESVGSGKSSKRNGYPDIGHTQQRERERERRERGERGESPCTQCFRVLLYSTPWSTAIAVLGRAQDSLWFCLLASCCFLIFGKKPCLTYAWPSWKLLVFIFRVWNGLTWPIYFPVSTKEGLPGTTN

SEQ ID NO: 32873 - protein, 18 aa, Homo sapiens
MTSSGLFLRKPTSAPYHM

SEQ ID NO: 32874 - protein, 29 aa, Homo sapiens
KAPSAVRGAGARGGRALLSLRTAQRCALG

SEQ ID NO: 32875 - protein, 46 aa, Homo sapiens
LYFLLFSLLVKTRMKTSMMSHLHLMTVSHWPATCSSLCLPDYNNSM

SEQ ID NO: 32876 - protein, 47 aa, Homo sapiens
MSPVIQQPWPSFDGLNIWSSLNSLYIGNLPASIHIPTSVCIPRITGR

SEQ ID NO: 32877 - protein, 18 aa, Homo sapiens
IAWRFWRICKYKWKAHMY

SEQ ID NO: 32878 - protein, 124 aa, Homo sapiens
IQEKRIVEAANKKEVDYETGDIPTEWEAWIRRTRKTPPTMEEILKNEKHREEIKIKSQDFYEKEKLLSKETSEELLPPPVQTQIKGRASAPYFGKEKPSVAPSSTGKTFQPGSWMPRDGKSHNE

SEQ ID NO: 32879 - protein, 12 aa, Homo sapiens
MHCFTRGNGPFF

SEQ ID NO: 32880 - protein, 7 aa, Homo sapiens
LWVFFKG

SEQ ID NO: 32881 - protein, 7 aa, Homo sapiens
KTSIGEV

SEQ ID NO: 32882 - protein, 380 aa, Homo sapiens
ICEGNPYVLGIRDTDSAQEFQKQLTKAKRIMILGNGGIALELVYEIEGCEVIWAIKDKAIGNTFFDAGAAEFLTSKLIAEKSEAKIAYKRTRYTTEGRKKEARSKSKSDNVGSALGPDWHEGLNLKGTKEFSHKIHLEAMCEVKKIYLQDEFRILKKKSFTFPRDHTSVTTNTEMWPVYVELTNEKIYGCDFIVSATGVTPNIEPFLHGNSFDLGEDGGLKVDDHMHTSLPDIYAAGDICTTSWQLSPVWQQMRLWTQARQMGWYAAKCMAAASSGDSIDMDFSFELFAHVTKFFNYKVVLLGKYNAQGLGSDHELMLRCTKGQEYIKVVMQNGRMMGAFLIGETDLEETFENLILNQMNLSSYGEDLLDPNIDIEDYFD

SEQ ID NO: 32883 - protein, 9 aa, Homo sapiens
LESTCPFVF

SEQ ID NO: 32884 - protein, 7 aa, Homo sapiens
MTTFVNY

SEQ ID NO: 32885 - protein, 22 aa, Homo sapiens
KVPLRTGCQFVLLCWLLMKIIK

SEQ ID NO: 32886 - protein, 61 aa, Homo sapiens
KTWPLQSVLSTASSLRPLVMMVQSASVSKAGKGSSSSHGVAAALNQDLDPDPKCHVFNVSK

SEQ ID NO: 32887 - protein, 5 aa, Homo sapiens
MEPLT

SEQ ID NO: 32888 - protein, 6 aa, Homo sapiens
MGLQGL

SEQ ID NO: 32889 - protein, 18 aa, Homo sapiens
VLTHQGNQLPFSLFLFFF

SEQ ID NO: 32890 - protein, 37 aa, Homo sapiens
MWLSPSAMIVRPSQPCRTVSPINLFCKLKKKNHYLRY

SEQ ID NO: 32891 - protein, 12 aa, Homo sapiens
IVLPVSSRFVCG

SEQ ID NO: 32892 - protein, 41 aa, Homo sapiens
RTVQGSPKTMELVIWDLGLLIFLTVNLLVVFVGTRGAENGE

SEQ ID NO: 32893 - protein, 56 aa, Homo sapiens
IKICLLLILMLPAQQVHQRARMNYGCHECPCEAVGKPWLDCEGYLKSILESTRSSM

SEQ ID NO: 32894 - protein, 62 aa, Homo sapiens [sequence omitted]

SEQ ID NO: 32895 - protein, 105 aa, Homo sapiens
MDKKSTHRNPEDARAGKYEGKHKRKKRRKQNQNQHRSRHRSVTSFSSDDPMFPSSSSSSSGSQTDSSIEDAAKGKIKKKRREKTNKWEKRKAAQEWRQYLLLARD

SEQ ID NO: 32896 - protein, 1599 aa, Homo sapiens
MEEVSKQSLFYGKKQPHEPHDNENNKWEMIKNGAFLDLLQHLGLEHYYPKKLSKANFHLIYKTSVYNTQPSSEQELPFYFLQKLLMMDYELRYLVFKDDRNTEHQVHPNASDQEDEAFDPYENFFEDSDSPTKSSSTEPSPHIHPVDIQMTIFHCADNFARQYILAKLSTCQFALPLLVPNPCTSQIEFSLWSLRQITRSWQEARKSPKGKNYYKNQQMCCVSTSIVSFVRVGNGLSASKSQIMNCLLSKRKHDVFFHRHCTGSRKDCLLMGGMVEICWFCPGGEDEDRFDNCVTFTNLHGDAKEHEQQLSFLKEVSTVIVVLMSASDDNEGNRKIVRNLWQSSRPLICLLDDKEATMTNISGQRMRMGIKNRNEAELTEELTTTIRHLLELSDTALSLEDCSQIAHQQGFLIDEDQRDCKEAKEKAQALMAFLGKMKLSQIKEKLLPLQGQLWHHWCKKDKELYHLREKGNQSIEQHKSEIETDKQIIRHEQLARALPLNDLMQSVLQFLQEHSEIHTKLYFLQWLSVFLDKLTAGHLEELHEKQKYWWSLVQTVKQKAPNSHSLICLQSEIEAISTEISDCTLGIEQLIREVGQIYEALEEASSIKKIFFSLPQIAADLMISGVPIELMDGDAAYVPLTWVAAVFDKVSEKLGDKRLFVLSILGLQSSGKSTVLNALFGLQFTVSAGKCTQGAYMQLLKVEETFTEELGFDFVLAVDTEGLRAPEHSNKSKDRDNELVTFVIGLANLTLINIFGENPSEMQDILQIVVQAFLRMKQVKIFPSCLFVHQNVGEATATDQTMDGRRRLEQKLDEMAAIAAEQEQCLDVTCFSDVIRFDVNTHVYYFAHLWDGNPPMAPPNPRYSHNVQQLKSRILMTATQESRGNIMKISDVKSRVQDLWRGLMNENFIFSFRNTQEVMAMNKLETMYNHWTWELRSHVLGLQNQLINQIQNGKIQTLEASTFEVLVTEKYEVVKQELEKYFNEGPCSKILIQCKANFENKLIVLKEKLISDSKRQANELISFKNQSQERLNKKKTDYEKELLEKSRKLALTVKGKELSEEELHEKFNQLWKKWVCDVSTTLPQVTEPDIDLDSENILWEYFKNKTNVVGLLTNSAEKFQINYDKHIKVNKKYNHIPMTLTVFEKEFINMTTDYIVSRFNKIINNMWKQQCGYNPNYFHEILKTIEEEVKSASTQKRYTFTNTFIIDLCVCLFQRARENFKEMHRAFKRANDPVNYLESKKDDFFTSFKISCQGATSIKTFVDVLWYKLTPAVSTTIWEDMTFKIAGDMRATCPAFNGNRTNLEKHILFSLAEEENFDNYWEYLHNSKSFFRSYIKNHIKRYCSDNGGEKMKTFFEKSLIDIKNTILSAIHESTSVAKDKSSTASEWLDLFCDCLGCNLIFPRRDLISIEHQEIKHTEFLKEAMSAALDLTMKKIEQNYSSKPIEAMVSKIEKMLSEHLCGCWKQCPSCGAICTNTIPTHEGDHSVPFHRPQAVNGEEWYETDDFVIDCCTSLVASDCLLVLRDGRNFPFKNYRQAGGDYAMWSITPDTSIQLYWKWFVSHFRSNLEEKYQKKFAGKGKIPNAWAKITKQDVLEDLKKQ

SEQ ID NO: 32897 - protein, 13 aa, Homo sapiens
MPSCMFSVCPRGL

SEQ ID NO: 32898 - protein, 117 aa, Homo sapiens
MAEVLRTLAGKPKCHALRPMILFLIMLVLVLFGYGVLSPRSLMPGSLERGFCMAVREPDHLQRVSLPRMVYPQPKVLTPCRKDVLVVPLGWLPLSGRAHSTSTSSTSSSGSRTPPLG

SEQ ID NO: 32899 - protein, 289 aa, Homo sapiens [sequence omitted]

SEQ ID NO: 32900 - protein, 39 aa, Homo sapiens
ILALTFNFRVLYIEGRVGKLIFFFNREGLTIFGRLGAKD

SEQ ID NO: 32901 - protein, 17 aa, Homo sapiens
LVTFLSMDDLLGYGESA

SEQ ID NO: 32902 - protein, 49 aa, Homo sapiens
LYFLLFSLLVKTRMKTSMMSHLHLMTVSHWPATCSRYSCAGCGTPHLCS

SEQ ID NO: 32903 - protein, 28 aa, Homo sapiens
MQLKDSLGPGSNRPLWTLRPLHLRVVCL

SEQ ID NO: 32904 - protein, 11 aa, Homo sapiens
ICKYKWKAHMY

SEQ ID NO: 32905 - protein, 111 aa, Homo sapiens
LELLNYLAALNDDGDLTELGSMMAEFPLDPQLAKMVIASCDYNCSNEVLSITAMLSGNRGKGTKKSPALQSLGGLHFCFCFLIFSMIVDFIDGFKELILFSKYLVNSFVMT

SEQ ID NO: 32906 - protein, 953 aa, Homo sapiens
LSGELQPQSISVQGSSLLISASNSLVADHLQRCGCEYSLSVFFLESGLAKEKVFTMQDLLQLIKINPTSSLYKSLVSGADKENQKGFLMHFLKGLAEYHQAKESCNMETQTSSTFSRDSLAEKLQLIDDQFADAYPQRIKFESLEIKLNEYKREIEEQLREEICQKLKFFKDTEIGKIKMEAKKKYEKELAVFQNDFEKACQAKSEALVIREKSTLERIQKHQEIETKEIYAQRQLLLKDMDLLRGREAELKQRVEAFELNQKLQEEKHKSMTEALRRREQNIKSFEKTYDQKLKNELLKYQLELKDDYIIRTNRLIEDERKNKEKAVHLQEELIAFNSKKEELNQSINRMKELELELESVKAQSLAITKQNHMLNEKVKVMSDYSLLKEERLELLAQNKLLKQQLEESRNENLRLLNRLAQLAPELAVFQKELRRAEKATVVEHEEFESRKQALHKQLQDEIEHTTQLKAQILGYKVSIKRLTIQVADLKSQLKQTQTALENEVYCNPKQSVIHHSANGLINGNMVLHNGEISGDFLNNPFKQEKVLAGTVASRITNYPNAGMEGSSPDSDLEFVANTNARVKQLQQEAERLEKAFRSYHRRDIKNSAKGPLPAKSPPSLHLLEAFKNITSSSPERRIFAEDRVVSEQPQVGTLKEERNDILEALTGSAASRLCGGTSSRRLSSTPLPKAKRSLESEIYLEGLGRSHIASPSPYPDRMPPPSPAESRHNLSIPPFSSPPEQKAGLYWRQNELQDKSEFSDADKLAFKDNEEFESSFEYARNVPRQFEMDGPSPAGDMLHMGAAVAAVPLSYQHPSVDQKQIEEQKEEEKIWEQQVKERKQREERRQSNLQEILERERRELEKLYQERRMTEESLKIEMENELEMSNQEMKDKSAHSENPLEKYMKIIQQDQESADKSSKKMVQEGSLVDTLQCSDKVESLTRFSHEEPDDSW

SEQ ID NO: 32907 - protein, 4 aa, Homo sapiens
LLSK

SEQ ID NO: 32908 - protein, 104 aa, Homo sapiens
MCSMVKKWQTMIEAHVDVRTIDGYLLRLFCVGFTKKRNNQIQKTSYAQHQRVRQIRKKMMEIMTREVQTNALKEVVNKLIPDSIGKDIEKACQSILSMMSSLEK

SEQ ID NO: 32909 - protein, 47 aa, Homo sapiens
LRGALKSAVGGEGPGHTPSPPDSSPSGSAQPWTLDLDKKREAALWWI

SEQ ID NO: 32910 - protein, 258 aa, Homo sapiens
RKSPQTCWQVYVSNSAKYSELGHPFGYLKASMALNCVNVFVMPYNYPVLPLLDDLLKVHKAKPTLKWRQSFESYLKTVPPYYLGPFKKAVSMMGAPNLIADSMEYGLSYSVISYLKKLSQQAKIESDRVIGSVGKKGVQETEIKVWSQSHGLSRAYRKDFQQLLQGISDVPHRLLDLNMKEYAGFHVALLNKDLKPQTFRNAYDIPRRNLLDHLTRMRSNLLKHTRRFLKGQDEDQVQCSYSTNGELPGIPQASYLLH

SEQ ID NO: 32911 - protein, 355 aa, Homo sapiens
IELCSSGASGSLFYVSSDDELIIKTLQHKEAEFLQKLLPGYYLNLSQNPRTLLPKFFGLYCVQTGGKNIRIVVMNNLLPRSVKMHIKYDLKGSTYKRRASQKEREKPLPTFKDLDFLQDIPDGLFLDADTYNALCKTLQRDCLVLQSFKIMDYSLWLSIHNIDHAQREPLSSDTLQVSIDTQRLAPQKALYSTAMEFIQGEARLGDTMEADDHMGGIPAQNSKGERLLLYIGIIDILQSYTFLKKLEHSWKAVVHDGDAVSVHRPGFYAERFQHFMCNAVFKKIPLKPSPSKKFRSGLSFSLHTGSSGNSCITYQPLVSEEHKSQVIKVQVEPGVHLGRSDVLPQTSESTFGGNQ

SEQ ID NO: 32912 - protein, 120 aa, Homo sapiens
LGNYLEMRLKSSFLRGLGSWKSNPLRLGGWTILLTLTMGQGEPGGPQGDPWVPHELLLPSLCDSSHASSWGSGSITCAWRGGDSSSHPLVSGHILSNSPVAAVMCSSMGTHLSPFKGTLL

SEQ ID NO: 32913 - protein, 15 aa, Homo sapiens
MTITHVFMVLIRFVS

SEQ ID NO: 32914 - protein, 14 aa, Homo sapiens
LRLSRDGHRLRVLA

SEQ ID NO: 32915 - protein, 318 aa, Homo sapiens
KNAQEALQAIETKVALMLQLLIHEEDDISPNIIGFCYYYLHIWKQLTVLLDQQKANVEAIMLAVMKKLTYDEEYNFENEGEDEAMFVEYRKQLKLLLDRLAQVSPELLVASVHSVFSSTLQDWQTTWFMEVEVAIRLLYMLAEALLVSHGVPFAGDVSKASALQDMMRILVTSRVSSYQHTSVTLEFFKNVVRYEKFFTVEPQHIPRVLMAFLDHRSLRHSSAKVRSRMAYLFSRFVKSLNKQMNPLTEDILNRIQDLLELSPPENGHQSLLGSDDQLFIYETAGVLTVNSEYLAERKQALVRNLLTPLMEKFKILLE

SEQ ID NO: 32916 - protein, 429 aa, Homo sapiens
ICSFIEQQFVQQKGQRFGLGSLAHSIPLGQADPSLARYIIDLPSWTQFRQDTGTMRTVRRHLFPQHSAPGRGVVWEWLSDDGSWTAYEAGVCDDLEQQVARGNQLVDLAPLGYNYTVNYTTHTQTNKTSSFCCSVRRQAGPPYPVTTIIAPPGHTGVACSCHQCLSGSRTGPVSGRYRHSMTNLPAYPAPQHPPHRTASVFGTHQAFAPYNKPSLSGARSAPRLNTTNAWDAAPPSLGSQPLYRSSLSHLGPQHLPPGSSTSGAVSASLPSGPSSSPGSVPATVPMQMPKPSRVQQALAGATPKPEPEPEQVIKNYTEELKVPPDEDCIICMEKLSAASGYSDVTDSKAIGPLAVGCLTKCSHAFHLLCLLAMYCNGNKGPEHPNPGKPFTARGFPRQCYLPDNAQGRKPPGASRTRRHWLTFRPPHSC

SEQ ID NO: 32917 - skipped

SEQ ID NO: 32918 - protein, 298 aa, Homo sapiens
ILTEAVYSYRGQKQKKVMLTVEQAQDQHYALVLWGPGAAWYPQLQRKKGYIWEFKYLFVQRNYTLENLELHTTPWSSCECLFDDDIRAITFKAKFQKSAPSFVKISDLATHLEDKCSGVVLIKAQISELAFPLTAAQKISLNAHSSLKSIFSSLPNIIYTGCAKCGLELETDENRIYKQCFSCLPFTMKKIYYRPALMTAVDGRHNVYIHVESKLIEKILLNISADCLNRVIVPSSEITYGMVVADLFHSLLAVSAEPCVLKIQSLFVLDENSYPLQQDFSLLDFYPDMVKHGANARL

SEQ ID NO: 32919 - protein, 667 aa, Homo sapiens
ILCLEKELKEEKSKHSQQNELMADISKTIQPLADESESLKSQVAEAKMIFKRFKMTEKQLKIAIKDALNENSHLQESQKQLLQEAEVWNEQVNELNKQKITFEDSKVHAEQVLNDKENHIKTLTEHLLKMKDWAARLREDVTDDDNLEVNSESEDGAYLDDPLKGALKKLIHATKLNASLKTLEGERNQIYIQLPEIDKTKEELTEHIKNLRTEQASLQSENTHFESENQKLQQKLKVMTELYQENEMKLYRKLTVEENSRLEKEEKLSKVDKKISHATKELETYRQRAKDLEEELERTIHYYQRQIISHEKKAHHNWLAAWAAERNLNDLRKENAHNRQKLAETEYKIKLLKKDPYVLDVPNTAFGREHSPYGPSSLGRPSSETRAFLSPATLLEGPLRLSPLPPGGEGRGSRGPGNPLDHQITKERGESSCERLTDPHRSPSDTGSLSLPREQDRRMMFPPPAQSYLDSALPPQRQDRFYSNSGGLSGPAELRSFNMPPLDKMDGSMPSEMESSRNDTKDDLGNLNIPDSSLPAENAATGPRFVPPPLALIRGPLFPVDTRGPFMRRAPPFPPPPPGTRFGASRDYFPPGDFPGPPHAPFAMRNVYPPRGFPPYPPPRPGFFPRPPHSEGRSEFPSGLIPPSNEPATEHPKPQQDTWQYFCSLQK

SEQ ID NO: 32920 - protein, 135 aa, Homo sapiens
VQEESDLEKRRREAEALLQSMGLTPESPIVPPPMSPSSKSVSTPSEAGSQDSGDGAVGSRRGPIKLGMAKITQVDFPPREIVTYTKETQTPVMAQPKKDEEEDDDVVAPKLPIEPEEEKTLKKDEENDSKAPPMS

SEQ ID NO: 32921 - protein, 7 aa, Homo sapiens
LDSKFVH

SEQ ID NO: 32922 - protein, 22 aa, Homo sapiens
LPVKTKAQIHFGYKFTFRELRL

SEQ ID NO: 32923 - protein, 16 aa, Homo sapiens
LTLTTIMGNAKVVWIW

SEQ ID NO: 32924 - protein, 119 aa, Homo sapiens
IDDNHAIVSTSVGSEHYISILSFADKDLLEPGCSVRLNHKVHTMIGVLMDDMDPLVTVMKVEKAPQETYADTGGLDNQIREIKESVELPLTHPEYYEEMGIKPPRGSFSVVHLAQVKPC

SEQ ID NO: 32925 - protein, 45 aa, Homo sapiens
VLFFSLFCLCISSNCLFKMPRIWTPSTSNRHWEGEGRKAECKMKW

SEQ ID NO: 32926 - protein, 45 aa, Homo sapiens
TECINETLYMDTRAFKTALPACRAFAVLQRFTGVIALKPRNNFTR

SEQ ID NO: 32927 - protein, 1357 aa, Homo sapiens
MHAFCVGQYLEPDQEIVTIPDLGSLSSPLIDTERNLGLLLGLHASYLAMSTPLSPVEIECAKWLQSSIFSGGLQTSQIHYSYNEEKDEDHCSSPGGTPASKSRLCSHRRALGDHSQAFLQAIADNNIQDHNVKDFLCQIERYCRQCHLTTPIMFPPEHPVEEVGRLLLCCLLKHEDLGHVALSLVHAGALGIEQVKHRTLPKSVVDVCRVVYQAKCSLIKTHQEQDRSYKEVCAPVIERLRFLFNELRPAVCNDLSIMSKFKLLSSLPHWRRIAQKIIREPRKKRVPKKPESTDDEEKIGNEESDLEEACILPHSPINVDKRPIAIKSPKDKWQPLLSTVTGVHKYKWLKQNVQGLYPQSPLLSTIAEFALKEEPVDVEKRKCLLKQLERAEVRLEGIDTILKLYLVSKNFLLPSVPYAMFCGWQRLIPEGIDIGEPLTDCLKDVDLIPPFNRMLLEVTFGKLYAWAVQNIRNVLVDASAKFKELGIQPVPLQTITNENPSGPSLGTIPQAHFLLVMLSMLTLQHSANNLDLLLNSGTLALAQTALRLIGPSCDNVEEDMNASAQGASATVLEETRKETAPVQLPVSGPELAAMMKIGTRVMRGVDWKWGDQDGPPPGLGRVIGELGEDGWIRVQWDTGSTNSYRMGKEGKYDLKLAELPAPAQPSAEDSDTEDDSEAEQTERNIHPTAMMFTSTINLLQTLCLSAGVHAEIMQSEATKTLCGLLQMLVESGMTDKTSSPNRLVYREQHRSWCTLGFVQSIALTLQVCGALSSLQWITLLMKVVEGHAPFTATSLQRQILAVHLLQAVLPSWDKTERARDMKCLVEKLFDFLGSLLTMCSSDVPLLRESMLRWRRVCPQASLTATHSSTLVEEVVALLHTLHSLTQWNGLINKYINSQLRSITHSFAGRPSEGAQLEDYFPDSENPEVGGLMAVLAVVGGIDGRLRLGGQVVHDDFGEVTMTRITLKGKITVQFSDMRTCRVCPLNQLKPLPAVAFNVNNLPFTEPMLSVWAQLVNLAGSKLEKHKIKKSTKQAFAGQVDLDLLRCQQLKLYILKAGRALFSHQDKLRQILSQPAVQETGSVHTDDGAVVSPDLGDMSPEGPQPPMILLQQLLASATQPSPVKAIFDKQELEAAALAVCQCLAVESTHPSSPGFEDCSSSEATTPVAVQHIRPARVKRRKQSPVPALPIVVQLMEMGFSRRNIEFALKSLTGASGNASGLPGVEALVGWLLDHSDIQVTELSDADTVSDEYSDEEVVEDVDDAAYSMSTGAVVTESQTYKNRAGFLGNDDYAVYVRENIQVGMMVRCCRTYEEVCEGDVMLAKSSSWTEMDCMISMCSVTGSRKGASTGLGTFMWNL

SEQ ID NO: 32928 - protein, 13 aa, Homo sapiens
KTKEVASMNDFRV

SEQ ID NO: 32929 - protein, 128 aa, Homo sapiens
KRRIHLELRNWTPSAVRELVLDNCKSNDGKIEGLTAEFVNLEFLSLINVGLISVSNLPKLPKLKKLELSENRIFGGLDMLAEKLPNLTRLNLSGNKLKDISTLEPLKKLECLKSLDLFNCEVTNMNDY

SEQ ID NO: 32930-32931 - skipped (2 entries)

SEQ ID NO: 32932 - protein, 370 aa, Homo sapiens
LEAALECENWLEKQQGNQERHLREMFTHMNSLSEETDHEHDVYWKSFNQKSVLITEDRVPKGSYAFHTLEKSLKQKSNLMKKQRTYKEKKPHKCNDCGELFTCHSVHIQHQRVHTGEKPYTCNECGKSFSHRANLTKHQRTHTRILFECRECKKTFTESSSLATHQRIHVGERPYECNECGKGFNRSTHLVQHQLIHTGVRPYECNECDKAFIHSSALIKHQRTHTGEKPYKCQECGKAFSHCSSLTKHQRVHTGEKPYECSECGKTFSQSTHLVQHQRIHTGEKPYECSECGKTFSQSSNFAKHQRIHIGKKPYKCSECGKAFIHSSALIQHQRTHTGEKPFRCNECGKSFKCSSSLIRHQRVHTEEQP

SEQ ID NO: 32933 - protein, 662 aa, Homo sapiens
LDLQQPVESTSGQQPSSTVSETAREVGQGNGLQKAQAHDGAGLKLVVSSPTSPKNKSWISEDDFYRPSREQPLKSASDHPIASYRGTPESRPGLHRHFSQEPRKNCSLGALDQACVPSPGRRQAQAAPSQGHKSFQVVHRRQMGLSNPFQGLMKLGTVERQGAMGIWKELFCELSPLEFRLYLSNEEHTCVENCSLLRCESVGPAHSDGRFELVFSGKKLALRASSQDEAEDWLDLVREALQKVRPQQEDEWVNVQYSDQPEEPPEAPQGCLSPSDLLSEPAALQGTQSDWSSAQVPELDAIKESLLYLYMDRTWMPYIFSLPLEALKCFRIRNNEKMLSDSHGVETIRDILPDTSLGGPSFFKIITAKAVLKLQAGNAEEAALWRDLVRKVLASYLETAEEAVTLGGSLDENCQEVLKFATRENGFLLQYLVAIPMEKGLDSQGCFCAGCSRQIGFSFVRPKLCAFSGLYYCDICHQDDASVIPARIIHNWDLTKRPICRQALKFLTQIRAQPLINLQMVNASLYEHVERMHLIGRSREQLKLLGDYLGLCRSGALKELSKRLNHRNYLLESPHRFRVADLRQIADEVYEGFLKALIEFASQHVYHCDLCTQRSFICQICQHHDIIFPSEFDTTVRCAKCKTVFHQSCQAVVKKGCPRCAR

SEQ ID NO: 32934 - protein, 103 aa, Homo sapiens
KRRTTDFSDFLSIVGCTKGRHNSEKPPEPVKPEVKTTEEKELSELKPKFQEHIQAPKTVDAIKRPSPDEPMTNLELKISASLKQALDKLKLSSGNEENKKRRQ

SEQ ID NO: 32935 - protein, 26 aa, Homo sapiens
IVIHLPPPLPFFFLELLRSPVGIPAD

SEQ ID NO: 32936 - protein, 19 aa, Homo sapiens
IMLYLKNTSKFSAQEIGLM

SEQ ID NO: 32937 - protein, 13 aa, Homo sapiens
IMLYLKNTTSQRK

SEQ ID NO: 32938 - protein, 20 aa, Homo sapiens
LSVLNLVIVKKRREGYSWTD

SEQ ID NO: 32939 - protein, 445 aa, Homo sapiens
IPAIKIKNITGRRDQGDGRNAGNKPVENQLELSFWLHLAELQGFQIERKIYECNQIEKSVTRGSSVSLLQTNLPCVNTSISNIYRNDFMHPSLLTQDQKAYIREKPYKCSDCGKAFNQRSNLTTHQRIHTGQKPHKCDICGKGFRRIANLASHHRIHTGEKPYRCNECGKTFNQTFNLTTHQRIHTGQKPYKCDRCGKGFRQIGNLASHHRIHTGEKPYRCNECGKTFNRMFHLTRHQRIHTGQKPYKCDICGKGFRQIANLASHHRIHTGEKPYKCSDCGKTFNYRSHLTRHQRIHTGQKPYKCDTCGKDFSQNSYLENHQRIHTREKSYRCNECGKTFNKMTNLTTHQRIHTGQKTYKCDICGKGFRQIGNLASHHRIHTGEKPYRCNECGKTFNRMFHLTRHQRIHTGQKPYKCDICGKSFSQNSYLENHQRIHTGEKTYKL

SEQ ID NO: 32940 - protein, 12 aa, Homo sapiens
TCLQEEAELRCL

SEQ ID NO: 32941 - protein, 383 aa, Homo sapiens
TAFLDIPGQDNLPPLTRLEKYAFSENTFNRQIIARGLLDIFRDFGNNEEDFLTVMEIVVRLSEDAEPTVRTELMEQIPPIAIFLQENRSNFPVVLSEYLIPIVVRYLTDPNNQIICKMASMLSKSTVERLLLPRFCELCGDRKLFQVRKVCAANFGDICHAVGQEATEKFLIPKFFELCSDAVWGMRKACAECFTAVSHSSSPGVRRTQLFPLFIRLVSDPCRWVHQAAFQSLGPFTSTFANPSRAGLYLREDGALSIWPLTQDLDSGFASGSPAPSSGGNTSPASLTRSAKPVRSEPELPVEGTSAKTSDCPHSSSSSDGPAESPVESCVSAGAEWTRVSPETSACSKLSDMNDLPISSYPGSDSWACPGNTEDVFSHFLYW

SEQ ID NO: 32942 - protein, 130 aa, Homo sapiens
RNSELFSKYLADPSNLFVVSSDFCHWGQRFRHSYYDESQGEICRSIEHLDKMGMSIIEQLDPVSFSNYLKKYHNTICGRHPIGVLLNAITELQKNGMNMSFSFLNYAQSSQCRNWQDSSVSYAAGALTVH

SEQ ID NO: 32943 - protein, 305 aa, Homo sapiens
KAKVLLSALERLKHQPVGKYQVVTGITPTPLGEGKSTTTIGLVQALLAHLYQNFFMCVRQPSQGPTFGIKGGVAGGGYSQVIPMEEFNLHLTGDIHAITVSNNLVAAAIDAQIFHELTQTDKATFTHLVPSVNGVRKFSDIHIQRLNRLGIDKTDSTTLTDEEINRFARLDIDPETIAWQRVLNTNDRFLRKITIGQAPTKKSHTQTVHFDISVASEIMAVLALTTSLEDRRERLGKMVVASSKKGDPVSAEDLGVSGALIVLMKDTIKPNLMQRLEGTPVFVHAGPFAIIAHGNSSIIADRITL

SEQ ID NO: 32944 - protein, 478 aa, Homo sapiens
KLQIKDKKLPLGFTFSFPCRQTKLDESFLVSWTKGFKSSGVEGRDVVALIRKAIQRRGDFDIDIVAVVNDTVGTMMTCGYDDHNCEIGLIVGTGSNACYMEEMRHIEMVEGDEGQMCINMEWGAFGDDGSLNDIRTEFDQEIDMGSLNLGKQLFEKVISGMYMGELMRFILVKMAKEELLFRGKLSPELLNTGHFETKDISDTEGEKDGIRKAREVLMRLGMDPTQEDCVATHRICQIVSTHSASLCTATLAPVLQRIKENKGEEQLRSTIGVDGSVYKKHPHFAKRLHKTVWRLVPDCYVCFLRSEDGSGKGAAMVTAVAYRLADQHRARQKTLEPLQLSHDQLLEVKRRMKVEMERGLSKETHASAPVKMLPTYVCATPDGTEKGDFLALDLGGTNFRVLLVCIRNGKWSGVEMHNKIYGIPQEVMHGTGDELFDHIVQCIEDFLEYMGMKGVSLPLGFTFSFPCQQNSLDESILL

SEQ ID NO: 32945 - protein, 11 aa, Homo sapiens
IRNYATAEEVY

SEQ ID NO: 32946 - protein, 13 aa, Homo sapiens
RLLPRLSSQVFGR

SEQ ID NO: 32947 - protein, 1883 aa, Homo sapiens
KRLQHLELMEDIVDLAKKAANDSLLIGGLLRIGYKIENKILAMEEALNWIKYAGDVTILTKLGSIDNCWPMLSIFFTEYKYHITKIVMEDCNLLEELKTQSCMDCIEQGELMKMKGNEEFSKERFDIAIIYYTRAIEYRPENHLLYGNRALCFLRTGQFRNALGDGKRATILKNTWPKGHYRYCDALSMLGEYNWALQANITAQKLCKNDPEGIKDLIQQHVKLQKQIEDLQGRTANKNPIKAFYENRAYTPRSLSAPVFSTSLNFVEKERDFRKINHEMANGGNQNLKVMDEALMVDDCDCHPEFSPPSSQPPKHKGKQKSRNNESEKFSSSSQLTLPADLKNILEKQFSKSSRGAHQDFANIMTMLRSLIQDGYTALLEQRCRSAAHAFTELLNGLDPQKIKQLNLAMINYVLVVYGLAISLLGIGQPEELSEAENQFKRIIEHYHNEGLDCLAYCGIGKVYLKKNRFLEALNHFEKARTLIYRLPGVLTWPTSNVIIEESQPEKIKMLLEKFVEECKFPPVPDAICCYQKCCGYSKIQIYITDPDFKGFIRISCCQYCKIEFHMNCWKKLKTTTFNDKIDKDFLQGICLTPDCEGVISKIIIFSSGGQVKCEFEHKVIKEKVPPRPILKQKCSSLEKLRLKEDKKLKRKIQKKEAKKLAQERMEEDLRESNPPKNEEQKETVDNVQHCQFLDDRILQCIKQYADKIKSGIWNTATLLKELLSWKVLSTEDYTTCFSSRNFLNEAVDYVIRHLIQEKNRVKTRIFLHVLSELKEVEPKLAAWIRKLNSFGLDATGPFFSRYEASLKQLDFSIMTFLWNEKYGHKLDSIEGKQLDYFFEPTSSKEARCLIWLLEEHRDKFPALHSALDEFFDIMDSRCTVLRKQDSGEAPFSSTKVKNKGKKKKPKDSKPMLVGSGTTSVTPNNEIITSSEDHSNQNSDTAGPFAVPDHLRQDVEEFEALYDQHSNEYVVRNKKLWDMNPKQKCSTLYDYFSQLLEEHGPLDMSHKMFSEEYEFFPEETRPILEKAGGLKSFLLGCPRFVVIDNCIALKKVASRLKKKRKKKNIKTKVEDISKAGEYLQVKLPLNSAAREFKPDVKSKPVSGSSSAPASEDVKPKPLSANSPKPACEDVKAKPVSDNSSRQVSEDGKPKGFSSNSPKPGSEDANYKRVSSNSPKPVLEDVKPTYWAQSHLVTGYCTYLPFQRFDNTRTSPAYINVLPGLPQYTSIYTPLVSLSPEYQLPRSVPVVPSFVANDRADKNATAYFEGHHLNAENAAGHQIASETQILEDSSLISVKSQCSTGDAHTVLSESNRKDGHCGNSNNKCEVIPESTSAVTNIPQVQMVAIQVSWNITHQEVNTEPYNPFEKQQGEISRIEKEYQVLQDQLKEAYENYEQIKLKGLEETRDLEEKLKRHLEENKISKTELDWLLQDLEREIKKWQEEKKEIQKTLKSLKKKIKKVSNANEMYTQKNDGNDKEHELHLDQSLEISNTLTNEKMKIEECIKKGKKDYEESHQRAVAAEVSVLENWKESEVYKLQIMQSQAEAYLKKLELISHDPAAYPDMESDICSWELFLSNVTKETEKAKYQFEEQIKAIKNGSRLSELSKVQISELSFPACNTVHPELLPESSGHDDQGFMTSASDVTGNQAALHRDPSVFSAGDSPGEAPSALLPGPPPSQPEATQLPGPKGAGQAALSEQSPAADQKQPVPPGCAACSSQSPKKPFNSIIEHLSVVFPCYNSTELAGFIKKVRSKNKNSLSGLSIDEIVQRVTEHILDEQKKKKPNPGKDKRTYEPSSAAHVTRSSQGPPLAVVAPSPKTKGQKAEDVPVRVALGASSCEICHEVFKSKNVRVLKCGHKYHKGCFKQWLKGQSACPACQTCDLLSEE

SEQ ID NO: 32948 - protein, 41 aa, Homo sapiens
LLSRGLNRLLTLPEVQCIFQDFQVFDAVMLRVHYPRLFIQE

SEQ ID NO: 32949 - protein, 41 aa, Homo sapiens
LDLLRIPSNSYLVSKSANCFLLISSLSMISVMEIGLKRLLF

SEQ ID NO: 32950 - protein, 21 aa, Homo sapiens
RKKPDESAPFVCMPSPIRVLL

SEQ ID NO: 32951 - protein, 14 aa, Homo sapiens
LCPQGRMRIATEVS

SEQ ID NO: 32952 - protein, 18 aa, Homo sapiens
IFSVNFKDDWDFLPPLPP

SEQ ID NO: 32953 - protein, 18 aa, Homo sapiens
MPPPSPSGKIHPIAQHPC

SEQ ID NO: 32954 - protein, 32 aa, Homo sapiens
KMLSLFQSEISPRPMNKTGSCPEYTPKLQAPA

SEQ ID NO: 32955 - protein, 26 aa, Homo sapiens
LVLFSSVKRPYRITDFMLALPPYKIT

SEQ ID NO: 32956 - protein, 7 aa, Homo sapiens
IITCWSL

SEQ ID NO: 32957 - protein, 16 aa, Homo sapiens
ISKMLLKAHGHDCTPH

SEQ ID NO: 32958 - protein, 70 aa, Homo sapiens
LKFSGTHLLLPLKNQLQSVMSSLGSHQNKETGLKTLIPESILPHIQNEIHAQRCQEESRQTGLSRICGNI

SEQ ID NO: 32959 - protein, 17 aa, Homo sapiens
IAWLKPDTFNSVLSVDE

SEQ ID NO: 32960 - protein, 56 aa, Homo sapiens
RISGECGSSFPQVVGSLFLSPGGPKFIHLMYHFARFVAMEYIKSNSKNYQLSRYET

SEQ ID NO: 32961 - protein, 6 aa, Homo sapiens
MQALAP

SEQ ID NO: 32962 - protein, 32 aa, Homo sapiens
RNLRTKQPTLLLLWGFNGQGRLEKGCSAFPFS

SEQ ID NO: 32963 - protein, 156 aa, Homo sapiens
KRKEEERKKKETDQKKEAVAPVQEESDLEKRRREAEALLQSMGLTPESPIVPPPMSPSSKSVSTPSEAGSQDSGDGAVGSRRGPIKLGMAKITQVDFPPREIVTYTKETQTPVMAQPKKDEEEDDDVVAPKLPIEPEEEKTLKKDEENDSKAPPMS

SEQ ID NO: 32964 - protein, 15 aa, Homo sapiens
MIANSQIYLDSKFVH

SEQ ID NO: 32965 - protein, 54 aa, Homo sapiens
TKMERLIGSGRMKQFGEDRSLKWKTGRQKYGKAKKRIEKIGKLEDKNILLEEKR

SEQ ID NO: 32966 - protein, 66 aa, Homo sapiens
VFAPPRPGQRQAGAPWVPERRKRRPDGDTFLLSFLSTTWLKTWRSQQYKESKSRSCAREQMNSSSC

SEQ ID NO: 32967 - protein, 69 aa, Homo sapiens
IWHDLQYDLVLCYPQEPRDGLESAYIPEQESLPMKIGGIFCLFVLFCLLFVVCFFATNFSIHSALLDKS

SEQ ID NO: 32968 - protein, 27 aa, Homo sapiens
KKSLECTKLCLPQIENVKGTEDSGEEK

SEQ ID NO: 32969 - protein, 48 aa, Homo sapiens
KKSYLFLKKKKKVFASSVLVFCTSVNLLALPSKSTAFFTFFYDQGKDH

SEQ ID NO: 32970 - protein, 18 aa, Homo sapiens
LSPRVGSPASFTQLLSRF

SEQ ID NO: 32971 - protein, 22 aa, Homo sapiens
KRSQSPTLSALMEVSSFGKSFI

SEQ ID NO: 32972 - protein, 58 aa, Homo sapiens
ICSVSLCTLNIYPLCDKKKKKKKKRIVRRLSIFHSLSLGKMVHGINSWYLYLKLRLVT

SEQ ID NO: 32973 - protein, 9 aa, Homo sapiens
MFSVCPRGL

SEQ ID NO: 32974 - protein, 83 aa, Homo sapiens
VTGGEGRGQRARIRAFRGSRALRAPPYPRGWRAAPEAPARLAVPRLPARASYSTRALNLSVTQALSPESLASWFKRNGRKGAM

SEQ ID NO: 32975 - protein, 8 aa, Homo sapiens
MLMLAESS

SEQ ID NO: 32976 - protein, 16 aa, Homo sapiens
VMPHSIRNYATAEEVY

SEQ ID NO: 32977 - protein, 12 aa, Homo sapiens
LKSILESTRSSM

SEQ ID NO: 32978 - protein, 66 aa, Homo sapiens
MAKQQEQDPTNLYISNLPLSMDEQELENMLKPFGQVISTRILRDSSGTSRGVGFARFFFFFVRNKT

SEQ ID NO: 32979 - protein, 329 aa, Homo sapiens
MEIVVRLSEDAEPTVRTELMEQIPPIAIFLQENRSNFPVVLSEYLIPIVVRYLTDPNNQIICKMASMLSKSTVERLLLPRFCELCGDRKLFQVRKVCAANFGDICHAVGQEATEKFLIPKFFELCSDAVWGMRKACAECFTAVSHSSSPGVRRTQLFPLFIRLVSDPCRWVHQAAFQSLGPFTSTFANPSRAGLYLREDGALSIWPLTQDLDSGFASGSPAPSSGGNTSPASLTRSAKPVRSEPELPVEGTSAKTSDCPHSSSSSDGPAESPVESCVSAGAEWTRVSPETSACSKLSDMNDLPISSYPGSDSWACPGNTEDVFSHFLYW

SEQ ID NO: 32980 - protein, 109 aa, Homo sapiens
MLAVPVTCGDTARSALQPDLLARRRLKRCPSRWLCLSAAWSFVQVFSEPDGFTVIFSGLGNNAGGTMHWNDTRPAHFRILKVVLREAVAECLMDSYSLDVHGGRRTAAG

SEQ ID NO: 32981 - protein, 33 aa, Homo sapiens
LCPQGRMRIATEVLKSKPNSSHWHTGIRQKAGS

SEQ ID NO: 32982 - protein, 713 aa, Homo sapiens
IFTQKSKVPVLDEGLTSVETYTSAIRANDNKSMADVLGDGGNSSLTISEGPIVSERRLNQEVALNLKEDHEVEVGVLKESVDLPEEKLPISDSPPDTQEIHVIEQEKLEAQDSGEEARNLSFNELYPSGTLKLQYNFDTIDQQFCDLADNKDTAECDIAEVDGELFVAPSNFTLILEGEEGEVEPGDFASSDVLPKAANTATEEKLVCSGKNDNHGQVANLPSAVTSDQKSQKVETLPYVPEPIKVAIAENLLDVIKDTRSKEITSDTMEQSIHETIPLVSQNIMCPTKLVKSAFKTAQETSTMTMNVSQVDDVVSSKTRTRGQRIQNVNVKSAQQEASADVATPKMPGQSVKKKTRKAKEISEASENIYSDVRGLSQNQQIPQNSVTPRRGRRKKEVNQDILENTSSVEQELQITTGRESKRLKSSQLLEPAVEETTKKEVKVSSVTKRTPRTIKRSVENQESVEIINDLKVSTVTSPSRMIRKLRSAHLDASENTGNKQEDKSSDKQLPIKHIRRVRGREVSPSDVRENSNLESSQLTLQAEFDMSAIPRKRGRPRKINPSEDVGSKAVKEERSPKKKEAPSIKRRSTRNTPAKSENVDVGKPALGKSILVPNEELSMVMSSKKKLTKKTESQSQKRSLHSVSEERTDEMTHKETNEQEERLLATASFTKSSRSTRTQSSKAILLPDLSEPNNEPLFSPAAEVPRKQKLKK

SEQ ID NO: 32983 - protein, 739 aa, Homo sapiens
INKQTSSTPSSLALTSASRIRERSESLDPDSSMDTTLILKDTEAVMAFLEAKLREDNKTDEGPDTPSYKRDNSISPESDVDTASTISLVTGETERKSTQKRKSFTSLYKDRCSTGSPSKDVTKSSSSGAREKMEKKTKSRSTDVGSRADGHKFVQSSGRIRQPSVDLTDDDQTSSVPHSAISDIMSSDQETYSCKPHGRTPLTSADEHVHSKLEGSKVTKSKTSPVVSGSSSKSTTLPRPRPTRTSLLRRARRGEASDSELADADKASVASEVSTTSSTSKPPTGRRNISRIDLLAQPRRTRLGSLSARSDSEATISRSSASSRTAEAIIRSGARLVPSDKFSPRIRANSISRLSDSKVKSMTSAHGSASVNSRWRRFPTGYASTSEDEFGSDHNSPKHTRLCTSPALKTTRLQSAGSAMPTSSSFKHRIKEQEDYIRDWTAHREEIARISQDLALIAREINDVAGEIDSVTSSGTAPSTTVSTAATTPGSAIDTREEVGDLHGEMHKLVDRVFDESLNFQKIPPLVHSKTPEGNNGRSGDPRPQAAEPPDHLTITRRRTWSRDEVMGDNLLLSSVFQFSKKIRQSIDKTAGKIRILFKDKDRNWDDIESKLRAESEVPIVKTSSMEISSILQELKRVEKQLQAINAMIDPDGTLEALNNMGFPSAMLPSPPKQKSSPVNNHHSPGQTPTLGQPEARALHPAAVSAAAEFENAESEADFSIHFNRVNPDGEEEDVTVHK

SEQ ID NO: 32984 - protein, 12 aa, Homo sapiens
KLLRADCQVLEK

SEQ ID NO: 32985 - protein, 8 aa, Homo sapiens
IIIPGTWQ

SEQ ID NO: 32986 - protein, 18 aa, Homo sapiens
KTPPRPRMQSTSNKIAGL

SEQ ID NO: 32987 - protein, 405 aa, Homo sapiens
LQGFQIERKIYECNQIEKSVTRGSSVSLLQTNLPCVNTSISNIYRNDFMHPSLLTQDQKAYIREKPYKCSDCGKAFNQRSNLTTHQRIHTGQKPHKCDICGKGFRRIANLASHHRIHTGEKPYRCNECGKTFNQTFNLTTHQRIHTGQKPYKCDRCGKGFRQIGNLASHHRIHTGEKPYRCNECGKTFNRMFHLTRHQRIHTGQKPYKCDICGKGFRQIANLASHHRIHTGEKPYKCSDCGKTFNYRSHLTRHQRIHTGQKPYKCDTCGKDFSQNSYLENHQRIHTREKSYRCNECGKTFNKMTNLTTHQRIHTGQKTYKCDICGKGFRQIGNLASHHRIHTGEKPYRCNECGKTFNRMFHLTRHQRIHTGQKPYKCDICGKSFSQNSYLENHQRIHTGEKTYKL

SEQ ID NO: 32988 - protein, 1931 aa, Homo sapiens
ISVLQDYCDAIKINIFWPLLFQHQNSSVISRLHPCVDANNSRASEINLKRLQHLELMEDIVDLAKKAANDSLLIGGLLRIGYKIENKILAMEEALNWIKYAGDVTILTKLGSIDNCWPMLSIFFTEYKYHITKIVMEDCNLLEELKTQSCMDCIEQGELMKMKGNEEFSKERFDIAIIYYTRAIEYRPENHLLYGNRALCFLRTGQFRNALGDGKRATILKNTWPKGHYRYCDALSMLGEYNWALQANITAQKLCKNDPEGIKDLIQQHVKLQKQIEDLQGRTANKNPIKAFYENRAYTPRSLSAPVFSTSLNFVEKERDFRKINHEMANGGNQNLKVMDEALMVDDCDCHPEFSPPSSQPPKHKGKQKSRNNESEKFSSSSQLTLPADLKNILEKQFSKSSRGAHQDFANIMTMLRSLIQDGYTALLEQRCRSAAHAFTELLNGLDPQKIKQLNLAMINYVLVVYGLAISLLGIGQPEELSEAENQFKRIIEHYHNEGLDCLAYCGIGKVYLKKNRFLEALNHFEKARTLIYRLPGVLTWPTSNVIIEESQPEKIKMLLEKFVEECKFPPVPDAICCYQKCCGYSKIQIYITDPDFKGFIRISCCQYCKIEFHMNCWKKLKTTTFNDKIDKDFLQGICLTPDCEGVISKIIIFSSGGQVKCEFEHKVIKEKVPPRPILKQKCSSLEKLRLKEDKKLKRKIQKKEAKKLAQERMEEDLRESNPPKNEEQKETVDNVQHCQFLDDRILQCIKQYADKIKSGIWNTATLLKELLSWKVLSTEDYTTCFSSRNFLNEAVDYVIRHLIQEKNRVKTRIFLHVLSELKEVEPKLAAWIRKLNSFGLDATGPFFSRYEASLKQLDFSIMTFLWNEKYGHKLDSIEGKQLDYFFEPTSSKEARCLIWLLEEHRDKFPALHSALDEFFDIMDSRCTVLRKQDSGEAPFSSTKVKNKGKKKKPKDSKPMLVGSGTTSVTPNNEIITSSEDHSNQNSDTAGPFAVPDHLRQDVEEFEALYDQHSNEYVVRNKKLWDMNPKQKCSTLYDYFSQLLEEHGPLDMSHKMFSEEYEFFPEETRPILEKAGGLKSFLLGCPRFVVIDNCIALKKVASRLKKKRKKKNIKTKVEDISKAGEYLQVKLPLNSAAREFKPDVKSKPVSGSSSAPASEDVKPKPLSANSPKPACEDVKAKPVSDNSSRQVSEDGKPKGFSSNSPKPGSEDANYKRVSSNSPKPVLEDVKPTYWAQSHLVTGYCTYLPFQRFDNTRTSPAYINVLPGLPQYTSIYTPLVSLSPEYQLPRSVPVVPSFVANDRADKNATAYFEGHHLNAENAAGHQIASETQILEDSSLISVKSQCSTGDAHTVLSESNRKDGHCGNSNNKCEVIPESTSAVTNIPQVQMVAIQVSWNITHQEVNTEPYNPFEKQQGEISRIEKEYQVLQDQLKEAYENYEQIKLKGLEETRDLEEKLKRHLEENKISKTELDWLLQDLEREIKKWQEEKKEIQKTLKSLKKKIKKVSNANEMYTQKNDGNDKEHELHLDQSLEISNTLTNEKMKIEECIKKGKKDYEESHQRAVAAEVSVLENWKESEVYKLQIMQSQAEAYLKKLELISHDPAAYPDMESDICSWELFLSNVTKETEKAKYQFEEQIKAIKNGSRLSELSKVQISELSFPACNTVHPELLPESSGHDDQGFMTSASDVTGNQAALHRDPSVFSAGDSPGEAPSALLPGPPPSQPEATQLPGPKGAGQAALSEQSPAADQKQPVPPGCAACSSQSPKKPFNSIIEHLSVVFPCYNSTELAGFIKKVRSKNKNSLSGLSIDEIVQRVTEHILDEQKKKKPNPGKDKRTYEPSSAAHVTRSSQGPPLAVVAPSPKTKGQKAEDVPVRVALGASSCEICHEVFKSKNVRVLKCGHKYHKGCFKQWLKGQSACPACQTCDLLSEE

SEQ ID NO: 32989 - protein, 55 aa, Homo sapiens
MLNHFCFFFLLKSQDKEYLLILLNIDVWTELSLHDNCSQDSATQNGQTSLNQFTL

SEQ ID NO: 32990 - protein, 1514 aa, Homo sapiens
MMDYELRYLVFKDDRNTEHQVHPNASDQEDEAFDPYENFFEDSDSPTKSSSTEPSPHIHPVDIQMTIFHCADNFARQYILAKLSTCQFALPLLVPNPCTSQIEFSLWSLRQITRSWQEARKSPKGKNYYKNQQMCCVSTSIVSFVRVGNGLSASKSQIMNCLLSKRKHDVFFHRHCTGSRKDCLLMGGMVEICWFCPGGEDEDRFDNCVTFTNLHGDAKEHEQQLSFLKEVSTVIVVLMSASDDNEGNRKIVRNLWQSSRPLICLLDDKEATMTNISGQRMRMGIKNRNEAELTEELTTTIRHLLELSDTALSLEDCSQIAHQQGFLIDEDQRDCKEAKEKAQALMAFLGKMKLSQIKEKLLPLQGQLWHHWCKKDKELYHLREKGNQSIEQHKSEIETDKQIIRHEQLARALPLNDLMQSVLQFLQEHSEIHTKLYFLQWLSVFLDKLTAGHLEELHEKQKYWWSLVQTVKQKAPNSHSLICLQSEIEAISTEISDCTLGIEQLIREVGQIYEALEEASSIKKIFFSLPQIAADLMISGVPIELMDGDAAYVPLTWVAAVFDKVSEKLGDKRLFVLSILGLQSSGKSTVLNALFGLQFTVSAGKCTQGAYMQLLKVEETFTEELGFDFVLAVDTEGLRAPEHSNKSKDRDNELVTFVIGLANLTLINIFGENPSEMQDILQIVVQAFLRMKQVKIFPSCLFVHQNVGEATATDQTMDGRRRLEQKLDEMAAIAAEQEQCLDVTCFSDVIRFDVNTHVYYFAHLWDGNPPMAPPNPRYSHNVQQLKSRILMTATQESRGNIMKISDVKSRVQDLWRGLMNENFIFSFRNTQEVMAMNKLETMYNHWTWELRSHVLGLQNQLINQIQNGKIQTLEASTFEVLVTEKYEVVKQELEKYFNEGPCSKILIQCKANFENKLIVLKEKLISDSKRQANELISFKNQSQERLNKKKTDYEKELLEKSRKLALTVKGKELSEEELHEKFNQLWKKWVCDVSTTLPQVTEPDIDLDSENILWEYFKNKTNVVGLLTNSAEKFQINYDKHIKVNKKYNHIPMTLTVFEKEFINMTTDYIVSRFNKIINNMWKQQCGYNPNYFHEILKTIEEEVKSASTQKRYTFTNTFIIDLCVCLFQRARENFKEMHRAFKRANDPVNYLESKKDDFFTSFKISCQGATSIKTFVDVLWYKLTPAVSTTIWEDMTFKIAGDMRATCPAFNGNRTNLEKHILFSLAEEENFDNYWEYLHNSKSFFRSYIKNHIKRYCSDNGGEKMKTFFEKSLIDIKNTILSAIHESTSVAKDKSSTASEWLDLFCDCLGCNLIFPRRDLISIEHQEIKHTEFLKEAMSAALDLTMKKIEQNYSSKPIEAMVSKIEKMLSEHLCGCWKQCPSCGAICTNTIPTHEGDHSVPFHRPQAVNGEEWYETDDFVIDCCTSLVASDCLLVLRDGRNFPFKNYRQAGGDYAMWSITPDTSIQLYWKWFVSHFRSNLEEKYQKKFAGKGKIPNAWAKITKQDVLEDLKKQ

SEQ ID NO: 32991 - protein, 41 aa, Homo sapiens
MPLSPPHLGTASSKNSCYDTEFNQEVMPHSIRNYATAEEVY

SEQ ID NO: 32992 - protein, 49 aa, Homo sapiens
LSLTEKNTLLSRGLNRLLTLPEVQCIFQDFQVFDAVMLRVHYPRLFIQE

SEQ ID NO: 32993 - protein, 14 aa, Homo sapiens
LEVEMVESNLPGPA

SEQ ID NO: 32994 - protein, 28 aa, Homo sapiens
LTTLCGASFKEAKDSEFMIEEMQADLLS

SEQ ID NO: 32995 - protein, 34 aa, Homo sapiens
LADRPLALGLGARFSASRMRSFAVHQDLGPSGIS

SEQ ID NO: 32996 - protein, 107 aa, Homo sapiens
IVPPPMSPSSKSVSTPSEAGSQDSGDGAVGSRRGPIKLGMAKITQVDFPPREIVTYTKETQTPVMAQPKKDEEEDDDVVAPKLPIEPEEEKTLKKDEENDSKAPPMS

SEQ ID NO: 32997 - protein, 16 aa, Homo sapiens
LATTRRRRAGVVRRGS

SEQ ID NO: 32998 - protein, 11 aa, Homo sapiens
KLSTFCWCIFR

SEQ ID NO: 32999 - protein, 4 aa, Homo sapiens
LLFR

SEQ ID NO: 33000 - protein, 13 aa, Homo sapiens
KGLVLLPRLVSRP

SEQ ID NO: 33001 - protein, 15 aa, Homo sapiens
IQTCLKTSFTTGLIR

SEQ ID NO: 33002 - protein, 61 aa, Homo sapiens
MRSQPSILLDARSNCTHGKSELPLSLSLSLVVIRIHQNPCLDLSLAEAALFPTERVSLSSC

SEQ ID NO: 33003 - protein, 56 aa, Homo sapiens
LIHRALQLAQRPVSLLASPWTSPTRLKTRGAGNGKGPLKGQPRDIYHQTWARYIVK

SEQ ID NO: 33004 - skipped

SEQ ID NO: 33005 - protein, 7 aa, Homo sapiens
MQINVLM

SEQ ID NO: 33006 - protein, 268 aa, Homo sapiens
ITPLLSLGAVGWELGREVPLAPVAFPLGRMAHAGRTGYDNREIVMKYIHYKLSQRGYEWDAGDVGAAPPGAAPAPGIFSSQPGHTPHPAASRDPVARTSPLQTPAAPGAAAGPALSPVPPVVHLTLRQAGDDFSRRYRRDFAEMSSQLHLTPFTARGRFATVVEELFRDGVNWGRIVAFFEFGGVMCVESVNREMSPLVDNIALWMTEYLNRHLHTWIQDNGGWDAFVELYGPSMRPLFDFSWLSLKTLLSLALVGACITLGAYLGHK

SEQ ID NO: 33007 - protein, 9 aa, Homo sapiens
IEPCLVNLQ

SEQ ID NO: 33008 - protein, 8 aa, Homo sapiens
MIEEMQGF

SEQ ID NO: 33009 - protein, 11 aa, Homo sapiens
ITKSLFKETVA

SEQ ID NO: 33010 - protein, 443 aa, Homo sapiens
KSTTTGHLIYKCGGIDKRTIEKFEKEAAEMGKGSFKYAWVLDKLKAERERGITIDISLWKFETSKYYVTIIDAPGHRDFIKNMITGTSQADCAVLIVAAGVGEFEAGISKNGQTREHALLAYTLGVKQLIVGVNKMDSTEPPYSQKRYEEIVKEVSTYIKKIGYNPDTVAFVPISGWNGDNMLEPSANMPWFKGWKVTRKDGNASGTTLLEALDCILPPTRPTDKPLRLPLQDVYKIGGIGTVPVGRVETGVLKPGMVVTFAPVNVTTEVKSVEMHHEALSEALPGDNVGFKVKNVSVKDVRRGNVAGDSKNDPPMEAAGFTAQVIILNHPGQISAGYAPVLDCHMAHIACKFAELKEKIDRRSGKKLEDGPKFLKSGDAAIVDMVPGKPMCVESFSDYPPLGRFAVRDMRQTVAVGVIKAVDKKAAGAGKVTKSAQKAQKAK

SEQ ID NO: 33011 - skipped

SEQ ID NO: 33012 - protein, 1163 aa, Homo sapiens
MKLSQIKEKLLPLQGQLWHHWCKKDKELYHLREKGNQSIEQHKSEIETDKQIIRHEQLARALPLNDLMQSVLQFLQEHSEIHTKLYFLQWLSVFLDKLTAGHLEELHEKQKYWWSLVQTVKQKAPNSHSLICLQSEIEAISTEISDCTLGIEQLIREVGQIYEALEEASSIKKIFFSLPQIAADLMISGVPIELMDGDAAYVPLTWVAAVFDKVSEKLGDKRLFVLSILGLQSSGKSTVLNALFGLQFTVSAGKCTQGAYMQLLKVEETFTEELGFDFVLAVDTEGLRAPEHSNKSKDRDNELVTFVIGLANLTLINIFGENPSEMQDILQIVVQAFLRMKQVKIFPSCLFVHQNVGEATATDQTMDGRRRLEQKLDEMAAIAAEQEQCLDVTCFSDVIRFDVNTHVYYFAHLWDGNPPMAPPNPRYSHNVQQLKSRILMTATQESRGNIMKISDVKSRVQDLWRGLMNENFIFSFRNTQEVMAMNKLETMYNHWTWELRSHVLGLQNQLINQIQNGKIQTLEASTFEVLVTEKYEVVKQELEKYFNEGPCSKILIQCKANFENKLIVLKEKLISDSKRQANELISFKNQSQERLNKKKTDYEKELLEKSRKLALTVKGKELSEEELHEKFNQLWKKWVCDVSTTLPQVTEPDIDLDSENILWEYFKNKTNVVGLLTNSAEKFQINYDKHIKVNKKYNHIPMTLTVFEKEFINMTTDYIVSRFNKIINNMWKQQCGYNPNYFHEILKTIEEEVKSASTQKRYTFTNTFIIDLCVCLFQRARENFKEMHRAFKRANDPVNYLESKKDDFFTSFKISCQGATSIKTFVDVLWYKLTPAVSTTIWEDMTFKIAGDMRATCPAFNGNRTNLEKHILFSLAEEENFDNYWEYLHNSKSFFRSYIKNHIKRYCSDNGGEKMKTFFEKSLIDIKNTILSAIHESTSVAKDKSSTASEWLDLFCDCLGCNLIFPRRDLISIEHQEIKHTEFLKEAMSAALDLTMKKIEQNYSSKPIEAMVSKIEKMLSEHLCGCWKQCPSCGAICTNTIPTHEGDHSVPFHRPQAVNGEEWYETDDFVIDCCTSLVASDCLLVLRDGRNFPFKNYRQAGGDYAMWSITPDTSIQLYWKWFVSHFRSNLEEKYQKKFAGKGKIPNAWAKITKQDVLEDLKKQ

SEQ ID NO: 33013 - protein, 32 aa, Homo sapiens
MTVYLLLLSARMMRILTTIILTEAPKMVSWGT

SEQ ID NO: 33014 - protein, 10 aa, Homo sapiens
VGFSLRDKKK

SEQ ID NO: 33015 - protein, 928 aa, Homo sapiens
VADHLQRCGCEYSLSVFFLESGLAKEKVFTMQDLLQLIKINPTSSLYKSLVSGADKENQKGFLMHFLKGLAEYHQAKESCNMETQTSSTFSRDSLAEKLQLIDDQFADAYPQRIKFESLEIKLNEYKREIEEQLREEICQKLKFFKDTEIGKIKMEAKKKYEKELAVFQNDFEKACQAKSEALVIREKSTLERIQKHQEIETKEIYAQRQLLLKDMDLLRGREAELKQRVEAFELNQKLQEEKHKSMTEALRRREQNIKSFEKTYDQKLKNELLKYQLELKDDYIIRTNRLIEDERKNKEKAVHLQEELIAFNSKKEELNQSINRMKELELELESVKAQSLAITKQNHMLNEKVKVMSDYSLLKEERLELLAQNKLLKQQLEESRNENLRLLNRLAQLAPELAVFQKELRRAEKATVVEHEEFESRKQALHKQLQDEIEHTTQLKAQILGYKVSIKRLTIQVADLKSQLKQTQTALENEVYCNPKQSVIHHSANGLINGNMVLHNGEISGDFLNNPFKQEKVLAGTVASRITNYPNAGMEGSSPDSDLEFVANTNARVKQLQQEAERLEKAFRSYHRRDIKNSAKGPLPAKSPPSLHLLEAFKNITSSSPERRIFAEDRVVSEQPQVGTLKEERNDILEALTGSAASRLCGGTSSRRLSSTPLPKAKRSLESEIYLEGLGRSHIASPSPYPDRMPPPSPAESRHNLSIPPFSSPPEQKAGLYWRQNELQDKSEFSDADKLAFKDNEEFESSFEYARNVPRQFEMDGPSPAGDMLHMGAAVAAVPLSYQHPSVDQKQIEEQKEEEKIWEQQVKERKQREERRQSNLQEILERERRELEKLYQERRMTEESLKIEMENELEMSNQEMKDKSAHSENPLEKYMKIIQQDQESADKSSKKMVQEGSLVDTLQCSDKVESLTRFSHEEPDDSW

SEQ ID NO: 33016 - protein, 27 aa, Homo sapiens
LSCSKAALCAIRINEGEGFCVEKRLGV

SEQ ID NO: 33017 - protein, 186 aa, Homo sapiens
RVVSSIEQKTEGAEKKQQMAREYREKIETELRDICNDVLSLLEKFLIPSASQAESKVFYLKMEGDYYRYLAEVAAGDDKKGIVDQSQQAYQEAFEISKKEMQPTHPIRLGLALNFSVFYYEILNSPEKACSLAKTAFDEAIAELDTLSEESYKDSTLIMQLLRDNLTLWTSDTQADEGEAGEGVEN

SEQ ID NO: 33018 - protein, 393 aa, Homo sapiens
LTFDVIPLLDPYGPAGSDPSLEFLVVSEETYRGGMAINRFRLENVTPEGDWQREWMGDGEGHFEGAVGSTMAPEERSGGSGWWEEARRNWFSVCPLSRRRRSLGRKGRMGGQVGCQGLPLTPSFPLFTLSSLPQDLEELALYQIQLLKDLRHTENEEDKVSSSSFRQRMLGNLLRPPYERPELPTCLYVIGLTGISGSGKSSIAQRLKGLGAFVIDSDHLGHRAYAPGGPAYQPVVEAFGTDILHKDGIINRKVLGSRVFGNKKQLKILTDIMWPIIAKLAREEMDRAVAEGKRVCVIDAAVLLEAGWQNLVHEVWTAVIPETEAVRRIVERDGLSEAAAQSRLQSQMSGQQLVEQSHVVLSTLWEPHITQRQVEKAWALLQKRIPKTHQALD

SEQ ID NO: 33019 - protein, 14 aa, Homo sapiens
RIMLYLKNTTSQRK

SEQ ID NO: 33020 - protein, 1834 aa, Homo sapiens
IKYAGDVTILTKLGSIDNCWPMLSIFFTEYKYHITKIVMEDCNLLEELKTQSCMDCIEQGELMKMKGNEEFSKERFDIAIIYYTRAIEYRPENHLLYGNRALCFLRTGQFRNALGDGKRATILKNTWPKGHYRYCDALSMLGEYNWALQANITAQKLCKNDPEGIKDLIQQHVKLQKQIEDLQGRTANKNPIKAFYENRAYTPRSLSAPVFSTSLNFVEKERDFRKINHEMANGGNQNLKVMDEALMVDDCDCHPEFSPPSSQPPKHKGKQKSRNNESEKFSSSSQLTLPADLKNILEKQFSKSSRGAHQDFANIMTMLRSLIQDGYTALLEQRCRSAAHAFTELLNGLDPQKIKQLNLAMINYVLVVYGLAISLLGIGQPEELSEAENQFKRIIEHYHNEGLDCLAYCGIGKVYLKKNRFLEALNHFEKARTLIYRLPGVLTWPTSNVIIEESQPEKIKMLLEKFVEECKFPPVPDAICCYQKCCGYSKIQIYITDPDFKGFIRISCCQYCKIEFHMNCWKKLKTTTFNDKIDKDFLQGICLTPDCEGVISKIIIFSSGGQVKCEFEHKVIKEKVPPRPILKQKCSSLEKLRLKEDKKLKRKIQKKEAKKLAQERMEEDLRESNPPKNEEQKETVDNVQHCQFLDDRILQCIKQYADKIKSGIWNTATLLKELLSWKVLSTEDYTTCFSSRNFLNEAVDYVIRHLIQEKNRVKTRIFLHVLSELKEVEPKLAAWIRKLNSFGLDATGPFFSRYEASLKQLDFSIMTFLWNEKYGHKLDSIEGKQLDYFFEPTSSKEARCLIWLLEEHRDKFPALHSALDEFFDIMDSRCTVLRKQDSGEAPFSSTKVKNKGKKKKPKDSKPMLVGSGTTSVTPNNEIITSSEDHSNQNSDTAGPFAVPDHLRQDVEEFEALYDQHSNEYVVRNKKLWDMNPKQKCSTLYDYFSQLLEEHGPLDMSHKMFSEEYEFFPEETRPILEKAGGLKSFLLGCPRFVVIDNCIALKKVASRLKKKRKKKNIKTKVEDISKAGEYLQVKLPLNSAAREFKPDVKSKPVSGSSSAPASEDVKPKPLSANSPKPACEDVKAKPVSDNSSRQVSEDGKPKGFSSNSPKPGSEDANYKRVSSNSPKPVLEDVKPTYWAQSHLVTGYCTYLPFQRFDNTRTSPAYINVLPGLPQYTSIYTPLVSLSPEYQLPRSVPVVPSFVANDRADKNATAYFEGHHLNAENAAGHQIASETQILEDSSLISVKSQCSTGDAHTVLSESNRKDGHCGNSNNKCEVIPESTSAVTNIPQVQMVAIQVSWNITHQEVNTEPYNPFEKQQGEISRIEKEYQVLQDQLKEAYENYEQIKLKGLEETRDLEEKLKRHLEENKISKTELDWLLQDLEREIKKWQEEKKEIQKTLKSLKKKIKKVSNANEMYTQKNDGNDKEHELHLDQSLEISNTLTNEKMKIEECIKKGKKDYEESHQRAVAAEVSVLENWKESEVYKLQIMQSQAEAYLKKLELISHDPAAYPDMESDICSWELFLSNVTKETEKAKYQFEEQIKAIKNGSRLSELSKVQISELSFPACNTVHPELLPESSGHDDQGFMTSASDVTGNQAALHRDPSVFSAGDSPGEAPSALLPGPPPSQPEATQLPGPKGAGQAALSEQSPAADQKQPVPPGCAACSSQSPKKPFNSIIEHLSVVFPCYNSTELAGFIKKVRSKNKNSLSGLSIDEIVQRVTEHILDEQKKKKPNPGKDKRTYEPSSAAHVTRSSQGPPLAVVAPSPKTKGQKAEDVPVRVALGASSCEICHEVFKSKNVRVLKCGHKYHKGCFKQWLKGQSACPACQTCDLLSEE

SEQ ID NO: 33021 - protein, 10 aa, Homo sapiens
MSLCVRCSSL

SEQ ID NO: 33022 - protein, 66 aa, Homo sapiens
MLSYRVSLCRPGWSAVARDLGSLQAPPPGFTPFSCLSLLSSWDYRRPPPHPGIQLAVCYHMCYTCC

SEQ ID NO: 33023 - protein, 54 aa, Homo sapiens
LKKFMDKKLSLKLNGGRHVQGILRGFDPFMNLVIDECVEMATSGQQNNIGMVVI

SEQ ID NO: 33024 - protein, 16 aa, Homo sapiens
KLSYCVLSLNFRTQNS

SEQ ID NO: 33025 - protein, 784 aa, Homo sapiens
VLRGKFAAGKNGLACLACGPQLEVVNSITGERLSAYRFSGVNEQPPVVLAVKEFSWQKRTGLLIGLEETEGSVLCLYDLGISKVVKAVVLPGRVTAIEPIINHGGASASTQHLHPSLRWLFGVAAVVTDVGQILLIDLCLDDLSCNQNEVEASDLEVLTGIPAEVPHIRESVMREGRHLCFQLVSPTGTAVSTLSYISRTNQLAAGFSDGYLALWNMKSMKREYYIQLESGQVPVYAVTFQEPENDRRNCCYLWAVQSTQDSEGDVLSLHLLQLAFGNRKCLASGQILYEWLEYCEERYTLDLTGGMFPLRGQTSNTKLLGCQSIEKFRSHGDREEGVNEALSPDTSVSVFTWQVNIYGQGKPSVYLGLFDINRWYHAQMPDSLRSGEYLHNCSYFALWSLESVVSRTSPHGILDILVHERSLNRGVPPSYPPPEQFFNPSTYNFDATCLLNSGVVHLTCTGFQKETLTFLKKSGPSLNELIPGGYNRRLVAGLLSPSFVDVQPSSLSQEEQLEAILSTAIQTSSLGLLTGYIRRWITEEQPNSATNLRFVLEWTWNKVVLTKEEFDRLCVPLFDGSCHFMDPQTIQSIQQCYLLLSNLNIVLSCFASEAREITERGLIDLSNKFVVSHLICQYAQVVLWFSHSGLLPEGIDDSVQLSRLCYNYPVIQNYYTSRRQKFERLSRGKWNPDCLMIDGLVSQLGERIEKLWKRDEGGTGKYPPASLHAVLDMYLLDGVTEAAKHSITIYLLLDIMYSFPNKTDTPIESFPTVFAISWGQVKLIQGFG

SEQ ID NO: 33026 - protein, 787 aa, Homo sapiens
KRRKAEEILKSQTPKGGDKKESSKSLVRQGSFTIEKPSPNIPIELIPHINKQTSSTPSSLALTSASRIRERSESLDPDSSMDTTLILKDTEAVMAFLEAKLREDNKTDEGPDTPSYKRDNSISPESDVDTASTISLVTGETERKSTQKRKSFTSLYKDRCSTGSPSKDVTKSSSSGAREKMEKKTKSRSTDVGSRADGHKFVQSSGRIRQPSVDLTDDDQTSSVPHSAISDIMSSDQETYSCKPHGRTPLTSADEHVHSKLEGSKVTKSKTSPVVSGSSSKSTTLPRPRPTRTSLLRRARRGEASDSELADADKASVASEVSTTSSTSKPPTGRRNISRIDLLAQPRRTRLGSLSARSDSEATISRSSASSRTAEAIIRSGARLVPSDKFSPRIRANSISRLSDSKVKSMTSAHGSASVNSRWRRFPTGYASTSEDEFGSDHNSPKHTRLCTSPALKTTRLQSAGSAMPTSSSFKHRIKEQEDYIRDWTAHREEIARISQDLALIAREINDVAGEIDSVTSSGTAPSTTVSTAATTPGSAIDTREEVGDLHGEMHKLVDRVFDESLNFQKIPPLVHSKTPEGNNGRSGDPRPQAAEPPDHLTITRRRTWSRDEVMGDNLLLSSVFQFSKKIRQSIDKTAGKIRILFKDKDRNWDDIESKLRAESEVPIVKTSSMEISSILQELKRVEKQLQAINAMIDPDGTLEALNNMGFPSAMLPSPPKQKSSPVNNHHSPGQTPTLGQPEARALHPAAVSAAAEFENAESEADFSIHFNRVNPDGEEEDVTVHK

SEQ ID NO: 33027 - protein, 25 aa, Homo sapiens
LPQDHSAPANSMQLTLTLNTLQLHS

SEQ ID NO: 33028 - protein, 13 aa, Homo sapiens
KPVMRLYVVKLID

SEQ ID NO: 33029 - protein, 898 aa, Homo sapiens
MQDLLQLIKINPTSSLYKSLVSGADKENQKGFLMHFLKGLAEYHQAKESCNMETQTSSTFSRDSLAEKLQLIDDQFADAYPQRIKFESLEIKLNEYKREIEEQLREEICQKLKFFKDTEIGKIKMEAKKKYEKELAVFQNDFEKACQAKSEALVIREKSTLERIQKHQEIETKEIYAQRQLLLKDMDLLRGREAELKQRVEAFELNQKLQEEKHKSMTEALRRREQNIKSFEKTYDQKLKNELLKYQLELKDDYIIRTNRLIEDERKNKEKAVHLQEELIAFNSKKEELNQSINRMKELELELESVKAQSLAITKQNHMLNEKVKVMSDYSLLKEERLELLAQNKLLKQQLEESRNENLRLLNRLAQLAPELAVFQKELRRAEKATVVEHEEFESRKQALHKQLQDEIEHTTQLKAQILGYKVSIKRLTIQVADLKSQLKQTQTALENEVYCNPKQSVIHHSANGLINGNMVLHNGEISGDFLNNPFKQEKVLAGTVASRITNYPNAGMEGSSPDSDLEFVANTNARVKQLQQEAERLEKAFRSYHRRDIKNSAKGPLPAKSPPSLHLLEAFKNITSSSPERRIFAEDRVVSEQPQVGTLKEERNDILEALTGSAASRLCGGTSSRRLSSTPLPKAKRSLESEIYLEGLGRSHIASPSPYPDRMPPPSPAESRHNLSIPPFSSPPEQKAGLYWRQNELQDKSEFSDADKLAFKDNEEFESSFEYARNVPRQFEMDGPSPAGDMLHMGAAVAAVPLSYQHPSVDQKQIEEQKEEEKIWEQQVKERKQREERRQSNLQEILERERRELEKLYQERRMTEESLKIEMENELEMSNQEMKDKSAHSENPLEKYMKIIQQDQESADKSSKKMVQEGSLVDTLQCSDKVESLTRFSHEEPDDSW

SEQ ID NO: 33030 - protein, 416 aa, Homo sapiens
MQDFYVVESIFFPSEGSNLTPAHHYNAFRFKTYAPVAFRYFRELFGIPPDDYLCSLCSEPLIELCSSGASGSLFYVSSDDELIIKTLQHKEAEFLQKLLPGYYLNLSQNPRTLLPKFFGLYCVQTGGKNIRIVVMNNLLPRSVKMHIKYDLKGSTYKRRASQKEREKPLPTFKDLDFLQDIPDGLFLDADTYNALCKTLQRDCLVLQSFKIMDYSLWLSIHNIDHAQREPLSSDTLQVSIDTQRLAPQKALYSTAMEFIQGEARLGDTMEADDHMGGIPAQNSKGERLLLYIGIIDILQSYTFLKKLEHSWKAVVHDGDAVSVHRPGFYAERFQHFMCNAVFKKIPLKPSPSKKFRSGLSFSLHTGSSGNSCITYQPLVSEEHKSQVIKVQVEPGVHLGRSDVLPQTSESTFGGNQ

SEQ ID NO: 33031 - protein, 26 aa, Homo sapiens
LSNSPVAAVMCSSMGTHLSPFKGTLL

SEQ ID NO: 33032 - protein, 33 aa, Homo sapiens
LSSVAQWSSSEDAKIHEKTSRTSGRIFNGKSLG

SEQ ID NO: 33033 - protein, 303 aa, Homo sapiens
LMLQLLIHEEDDISPNIIGFCYYYLHIWKQLTVLLDQQKANVEAIMLAVMKKLTYDEEYNFENEGEDEAMFVEYRKQLKLLLDRLAQVSPELLVASVHSVFSSTLQDWQTTWFMEVEVAIRLLYMLAEALLVSHGVPFAGDVSKASALQDMMRILVTSRVSSYQHTSVTLEFFKNVVRYEKFFTVEPQHIPRVLMAFLDHRSLRHSSAKVRSRMAYLFSRFVKSLNKQMNPLTEDILNRIQDLLELSPPENGHQSLLGSDDQLFIYETAGVLTVNSEYLAERKQALVRNLLTPLMEKFKILLE

SEQ ID NO: 33034 - protein, 26 aa, Homo sapiens
LSQQLLCKMPRPGIVAEHPRPAEVPP

SEQ ID NO: 33035 - protein, 38 aa, Homo sapiens
LTATSHQWLHSVSLTQHMAQECLPSVSVSTAAIPRCWS

SEQ ID NO: 33036 - protein, 5 aa, Homo sapiens
KCPFH

SEQ ID NO: 33037 - protein, 20 aa, Homo sapiens
ILFYNSFVCCCVFRTVPGTQ

SEQ ID NO: 33038 - protein, 109 aa, Homo sapiens
KGWSCCKRRTTDFSDFLSIVGCTKGRHNSEKPPEPVKPEVKTTEEKELSELKPKFQEHIQAPKTVDAIKRPSPDEPMTNLELKISASLKQALDKLKLSSGNEENKKRRQ

SEQ ID NO: 33039 - protein, 43 aa, Homo sapiens
LPRRGKHHRTSANTGLKIVIHLPPPLPFFFLELLRSPVGIPAD

SEQ ID NO: 33040 - protein, 474 aa, Homo sapiens
IQDFYFREMQQNIHDFECQCHNDERNYREIPAIKIKNITGRRDQGDGRNAGNKPVENQLELSFWLHLAELQGFQIERKIYECNQIEKSVTRGSSVSLLQTNLPCVNTSISNIYRNDFMHPSLLTQDQKAYIREKPYKCSDCGKAFNQRSNLTTHQRIHTGQKPHKCDICGKGFRRIANLASHHRIHTGEKPYRCNECGKTFNQTFNLTTHQRIHTGQKPYKCDRCGKGFRQIGNLASHHRIHTGEKPYRCNECGKTFNRMFHLTRHQRIHTGQKPYKCDICGKGFRQIANLASHHRIHTGEKPYKCSDCGKTFNYRSHLTRHQRIHTGQKPYKCDTCGKDFSQNSYLENHQRIHTREKSYRCNECGKTFNKMTNLTTHQRIHTGQKTYKCDICGKGFRQIGNLASHHRIHTGEKPYRCNECGKTFNRMFHLTRHQRIHTGQKPYKCDICGKSFSQNSYLENHQRIHTGEKTYKL

SEQ ID NO: 33041 - protein, 34 aa, Homo sapiens
KTMELVIWDLGLLIFLTVNLLVVFVGTRGAENGE

SEQ ID NO: 33042 - protein, 9 aa, Homo sapiens
VVVTDLIKL

SEQ ID NO: 33043 - protein, 1666 aa, Homo sapiens
IQQHVKLQKQIEDLQGRTANKNPIKAFYENRAYTPRSLSAPVFSTSLNFVEKERDFRKINHEMANGGNQNLKVMDEALMVDDCDCHPEFSPPSSQPPKHKGKQKSRNNESEKFSSSSQLTLPADLKNILEKQFSKSSRGAHQDFANIMTMLRSLIQDGYTALLEQRCRSAAHAFTELLNGLDPQKIKQLNLAMINYVLVVYGLAISLLGIGQPEELSEAENQFKRIIEHYHNEGLDCLAYCGIGKVYLKKNRFLEALNHFEKARTLIYRLPGVLTWPTSNVIIEESQPEKIKMLLEKFVEECKFPPVPDAICCYQKCCGYSKIQIYITDPDFKGFIRISCCQYCKIEFHMNCWKKLKTTTFNDKIDKDFLQGICLTPDCEGVISKIIIFSSGGQVKCEFEHKVIKEKVPPRPILKQKCSSLEKLRLKEDKKLKRKIQKKEAKKLAQERMEEDLRESNPPKNEEQKETVDNVQHCQFLDDRILQCIKQYADKIKSGIWNTATLLKELLSWKVLSTEDYTTCFSSRNFLNEAVDYVIRHLIQEKNRVKTRIFLHVLSELKEVEPKLAAWIRKLNSFGLDATGPFFSRYEASLKQLDFSIMTFLWNEKYGHKLDSIEGKQLDYFFEPTSSKEARCLIWLLEEHRDKFPALHSALDEFFDIMDSRCTVLRKQDSGEAPFSSTKVKNKGKKKKPKDSKPMLVGSGTTSVTPNNEIITSSEDHSNQNSDTAGPFAVPDHLRQDVEEFEALYDQHSNEYVVRNKKLWDMNPKQKCSTLYDYFSQLLEEHGPLDMSHKMFSEEYEFFPEETRPILEKAGGLKSFLLGCPRFVVIDNCIALKKVASRLKKKRKKKNIKTKVEDISKAGEYLQVKLPLNSAAREFKPDVKSKPVSGSSSAPASEDVKPKPLSANSPKPACEDVKAKPVSDNSSRQVSEDGKPKGFSSNSPKPGSEDANYKRVSSNSPKPVLEDVKPTYWAQSHLVTGYCTYLPFQRFDNTRTSPAYINVLPGLPQYTSIYTPLVSLSPEYQLPRSVPVVPSFVANDRADKNATAYFEGHHLNAENAAGHQIASETQILEDSSLISVKSQCSTGDAHTVLSESNRKDGHCGNSNNKCEVIPESTSAVTNIPQVQMVAIQVSWNITHQEVNTEPYNPFEKQQGEISRIEKEYQVLQDQLKEAYENYEQIKLKGLEETRDLEEKLKRHLEENKISKTELDWLLQDLEREIKKWQEEKKEIQKTLKSLKKKIKKVSNANEMYTQKNDGNDKEHELHLDQSLEISNTLTNEKMKIEECIKKGKKDYEESHQRAVAAEVSVLENWKESEVYKLQIMQSQAEAYLKKLELISHDPAAYPDMESDICSWELFLSNVTKETEKAKYQFEEQIKAIKNGSRLSELSKVQISELSFPACNTVHPELLPESSGHDDQGFMTSASDVTGNQAALHRDPSVFSAGDSPGEAPSALLPGPPPSQPEATQLPGPKGAGQAALSEQSPAADQKQPVPPGCAACSSQSPKKPFNSIIEHLSVVFPCYNSTELAGFIKKVRSKNKNSLSGLSIDEIVQRVTEHILDEQKKKKPNPGKDKRTYEPSSAAHVTRSSQGPPLAVVAPSPKTKGQKAEDVPVRVALGASSCEICHEVFKSKNVRVLKCGHKYHKGCFKQWLKGQSACPACQTCDLLSEE

SEQ ID NO: 33044 - protein, 229 aa, Homo sapiens
MESNQKSSFQEIPKLNEELLSKQKQLEKIESGEMGLNKVWINITEMNKQISLLTSAVNHLKANVKSAADLISLPTTVEGLQKSVASIGNTLNSVHLAVEALQKTVDEHKKTMELLQSDMNQHFLKETPGSNQIIPSPSATSELDNKTHSENLKQVLFISGLTPCDHSALQRQPNSLGLVFGVSAGASCIYLPAWELSREECVLVSRGSILLSFPFFGTLQFFPACQSVE

SEQ ID NO: 33045 - protein, 1645 aa, Homo sapiens
MGQSLSKEVAHVLTKPGADHDWENLEKDLRLLINGDYEEVTISSLQMEEVSKQSLFYGKKQPHEPHDNENNKWEMIKNGAFLDLLQHLGLEHYYPKKLSKANFHLIYKTSVYNTQPSSEQELPFYFLQKLLMMDYELRYLVFKDDRNTEHQVHPNASDQEDEAFDPYENFFEDSDSPTKSSSTEPSPHIHPVDIQMTIFHCADNFARQYILAKLSTCQFALPLLVPNPCTSQIEFSLWSLRQITRSWQEARKSPKGKNYYKNQQMCCVSTSIVSFVRVGNGLSASKSQIMNCLLSKRKHDVFFHRHCTGSRKDCLLMGGMVEICWFCPGGEDEDRFDNCVTFTNLHGDAKEHEQQLSFLKEVSTVIVVLMSASDDNEGNRKIVRNLWQSSRPLICLLDDKEATMTNISGQRMRMGIKNRNEAELTEELTTTIRHLLELSDTALSLEDCSQIAHQQGFLIDEDQRDCKEAKEKAQALMAFLGKMKLSQIKEKLLPLQGQLWHHWCKKDKELYHLREKGNQSIEQHKSEIETDKQIIRHEQLARALPLNDLMQSVLQFLQEHSEIHTKLYFLQWLSVFLDKLTAGHLEELHEKQKYWWSLVQTVKQKAPNSHSLICLQSEIEAISTEISDCTLGIEQLIREVGQIYEALEEASSIKKIFFSLPQIAADLMISGVPIELMDGDAAYVPLTWVAAVFDKVSEKLGDKRLFVLSILGLQSSGKSTVLNALFGLQFTVSAGKCTQGAYMQLLKVEETFTEELGFDFVLAVDTEGLRAPEHSNKSKDRDNELVTFVIGLANLTLINIFGENPSEMQDILQIVVQAFLRMKQVKIFPSCLFVHQNVGEATATDQTMDGRRRLEQKLDEMAAIAAEQEQCLDVTCFSDVIRFDVNTHVYYFAHLWDGNPPMAPPNPRYSHNVQQLKSRILMTATQESRGNIMKISDVKSRVQDLWRGLMNENFIFSFRNTQEVMAMNKLETMYNHWTWELRSHVLGLQNQLINQIQNGKIQTLEASTFEVLVTEKYEVVKQELEKYFNEGPCSKILIQCKANFENKLIVLKEKLISDSKRQANELISFKNQSQERLNKKKTDYEKELLEKSRKLALTVKGKELSEEELHEKFNQLWKKWVCDVSTTLPQVTEPDIDLDSENILWEYFKNKTNVVGLLTNSAEKFQINYDKHIKVNKKYNHIPMTLTVFEKEFINMTTDYIVSRFNKIINNMWKQQCGYNPNYFHEILKTIEEEVKSASTQKRYTFTNTFIIDLCVCLFQRARENFKEMHRAFKRANDPVNYLESKKDDFFTSFKISCQGATSIKTFVDVLWYKLTPAVSTTIWEDMTFKIAGDMRATCPAFNGNRTNLEKHILFSLAEEENFDNYWEYLHNSKSFFRSYIKNHIKRYCSDNGGEKMKTFFEKSLIDIKNTILSAIHESTSVAKDKSSTASEWLDLFCDCLGCNLIFPRRDLISIEHQEIKHTEFLKEAMSAALDLTMKKIEQNYSSKPIEAMVSKIEKMLSEHLCGCWKQCPSCGAICTNTIPTHEGDHSVPFHRPQAVNGEEWYETDDFVIDCCTSLVASDCLLVLRDGRNFPFKNYRQAGGDYAMWSITPDTSIQLYWKWFVSHFRSNLEEKYQKKFAGKGKIPNAWAKITKQDVLEDLKKQ

SEQ ID NO: 33046 - protein, 11 aa, Homo sapiens
MDDLLGYGESA

SEQ ID NO: 33047 - protein, 186 aa, Homo sapiens
RRKAEPQAVQSLRRSSPHTANCDRLSKSSTSPQPKRWQQDMSTSVPKLFLHLEKKTPVHSRSSSPTLTPSQEGSPVFAGFEGRRTNEINEVLSWKLVPDNYPPGDQPPPPSYIYGAQHLLRLFVKLPEILGKMSFTEKNLKALLKHFDLFVRFLAEYHDDFFPESAYVAASEVHYSTRNPQAVNKC

SEQ ID NO: 33048 - protein, 9 aa, Homo sapiens
ILKRTLSDW

SEQ ID NO: 33049 - protein, 607 aa, Homo sapiens
KLEAQDSGEEARNLSFNELYPSGTLKLQYNFDTIDQQFCDLADNKDTAECDIAEVDGELFVAPSNFTLILEGEEGEVEPGDFASSDVLPKAANTATEEKLVCSGKNDNHGQVANLPSAVTSDQKSQKVETLPYVPEPIKVAIAENLLDVIKDTRSKEITSDTMEQSIHETIPLVSQNIMCPTKLVKSAFKTAQETSTMTMNVSQVDDVVSSKTRTRGQRIQNVNVKSAQQEASADVATPKMPGQSVKKKTRKAKEISEASENIYSDVRGLSQNQQIPQNSVTPRRGRRKKEVNQDILENTSSVEQELQITTGRESKRLKSSQLLEPAVEETTKKEVKVSSVTKRTPRTIKRSVENQESVEIINDLKVSTVTSPSRMIRKLRSAHLDASENTGNKQEDKSSDKQLPIKHIRRVRGREVSPSDVRENSNLESSQLTLQAEFDMSAIPRKRGRPRKINPSEDVGSKAVKEERSPKKKEAPSIKRRSTRNTPAKSENVDVGKPALGKSILVPNEELSMVMSSKKKLTKKTESQSQKRSLHSVSEERTDEMTHKETNEQEERLLATASFTKSSRSTRTQSSKAILLPDLSEPNNEPLFSPAAEVPRKQKLKK

SEQ ID NO: 33050 - protein, 780 aa, Homo sapiens
ILKSQTPKGGDKKESSKSLVRQGSFTIEKPSPNIPIELIPHINKQTSSTPSSLALTSASRIRERSESLDPDSSMDTTLILKDTEAVMAFLEAKLREDNKTDEGPDTPSYKRDNSISPESDVDTASTISLVTGETERKSTQKRKSFTSLYKDRCSTGSPSKDVTKSSSSGAREKMEKKTKSRSTDVGSRADGHKFVQSSGRIRQPSVDLTDDDQTSSVPHSAISDIMSSDQETYSCKPHGRTPLTSADEHVHSKLEGSKVTKSKTSPVVSGSSSKSTTLPRPRPTRTSLLRRARRGEASDSELADADKASVASEVSTTSSTSKPPTGRRNISRIDLLAQPRRTRLGSLSARSDSEATISRSSASSRTAEAIIRSGARLVPSDKFSPRIRANSISRLSDSKVKSMTSAHGSASVNSRWRRFPTGYASTSEDEFGSDHNSPKHTRLCTSPALKTTRLQSAGSAMPTSSSFKHRIKEQEDYIRDWTAHREEIARISQDLALIAREINDVAGEIDSVTSSGTAPSTTVSTAATTPGSAIDTREEVGDLHGEMHKLVDRVFDESLNFQKIPPLVHSKTPEGNNGRSGDPRPQAAEPPDHLTITRRRTWSRDEVMGDNLLLSSVFQFSKKIRQSIDKTAGKIRILFKDKDRNWDDIESKLRAESEVPIVKTSSMEISSILQELKRVEKQLQAINAMIDPDGTLEALNNMGFPSAMLPSPPKQKSSPVNNHHSPGQTPTLGQPEARALHPAAVSAAAEFENAESEADFSIHFNRVNPDGEEEDVTVHK

SEQ ID NO: 33051 - protein, 245 aa, Homo sapiens
LQQLQEGTLQEYQKRMKKLGQQYKERIRNAELFLQLETEQVGRNYMKEKKAAVKEFEDKKVELKENLIAELAEEKKMIENEMLTMELNGDSMQVRPIMTRKLRRRPNDPVPIPDKRRKPAPAQLNYLLTDEQIMEDLRTLNKLKSPKRPASPSSPEHLPATPAESPAQRFEARIEDGKLHYDKRWYHKSQAIYLESKDNQKLSCVISSVGANEIWVRKTSDSTKMRIYLGQLQRGLFVIHRRSAA

SEQ ID NO: 33052 - protein, 390 aa, Homo sapiens
IDLPSWTQFRQDTGTMRTVRRHLFPQHSAPGRGVVWEWLSDDGSWTAYEAGVCDDLEQQVARGNQLVDLAPLGYNYTVNYTTHTQTNKTSSFCCSVRRQAGPPYPVTTIIAPPGHTGVACSCHQCLSGSRTGPVSGRYRHSMTNLPAYPAPQHPPHRTASVFGTHQAFAPYNKPSLSGARSAPRLNTTNAWDAAPPSLGSQPLYRSSLSHLGPQHLPPGSSTSGAVSASLPSGPSSSPGSVPATVPMQMPKPSRVQQALAGATPKPEPEPEQVIKNYTEELKVPPDEDCIICMEKLSAASGYSDVTDSKAIGPLAVGCLTKCSHAFHLLCLLAMYCNGNKGPEHPNPGKPFTARGFPRQCYLPDNAQGRKPPGASRTRRHWLTFRPPHSC

SEQ ID NO: 33053 - protein, 29 aa, Homo sapiens
ICAFFFIVLFVHFIQLFVQNAKNLDTLHQ

SEQ ID NO: 33054 - protein, 156 aa, Homo sapiens
IRNQEQMKPLEEKQEGKRSKVDDLRGTPMSVGILEEIIDDNHAIVSTSVGSEHYISILSFADKDLLEPGCSVRLNHKVHTMIGVLMDDMDPLVTVMKVEKAPQETYADTGGLDNQIREIKESVELPLTHPEYYEEMGIKPPRGSFSVVHLAQVKPC

SEQ ID NO: 33055 - protein, 24 aa, Homo sapiens
LPFSSALQGLSHLSLGTTLPDEDT

SEQ ID NO: 33056 - protein, 30 aa, Homo sapiens
VLLEKNLQAAHGCRYSTSMPWTLLWEDPII

SEQ ID NO: 33057 - protein, 927 aa, Homo sapiens
VMLGWARQGAFKELVYVLFMVKDAGLTPDLLSYAAALQCMGRQDQDAGTIERCLEQMSQEGLKLQALFTAVPLSEEDRATVLKAVHKVKPTFSLPLQLPPPVNTSKLLRDVYAKDGRVSYPKLHLPLKTLQCLFEKQLHVELASRMCVVSVEKPTLPSKEVTHARKTLKTLRDQWEKALCRELRETKNRLERQVYEGRFSLYPFLCLLDECEVVRMLLQVLQALPAQGESFTTLARELSARTFSRHVVQRQRVSAQVQALQNHYRKYLCLLASDAEVPEPCLPRQYCEALGAPEALREQPWPLPVQMELGKLLAEMLVQATQMPCSLDKPHRSSRLVPVVYHVYSFRNVQQIGILKPHPAYVQLLEKATEPTLTFEAVDVPMFCPPLPWTSPHSGAFLLSPTKLMRTVEGATQHQELLETCPPTALHGALDALAQLGNCAWRVNGRVLDLVLQLFQAKGCPYLGVPAPPSEAPQPPEAHLPHSAAPARKAELHRELAHCQKVAREMHSLRAEALYRLSLAQHLRDRVFWRPHNMDFRSRTYPCPPHFNHLGSDVARALLEFAQGRPLGPRGLDWLKIHLVNLTGLKKREPLRKRLAFAEEVMDDILDSADQPLTGRKWWMGAEEPWQTLACCMEVANTVRASDPAAYVSHLPVHQDGSCNGLQHYAALGRDSVGAASVNLEPSDVPQDVYSGVAGQVEVFRRQDAQRGTRVAQVLEGFITREVVKQTVMTMVYGVTRYGGRLQIEKRLRELNDFPQEFVWEASHYLVRQVFKSLQEMFSGTRAIQHWLTESARLISHTGSVVEWVTPLGVPVIQPYRLDSKVKQIGGGIQSITYTHNGDISRKPNTRKQKNGFPPNFIHSLDSSHMMLTALHCYRKGLTFVSVHDCYWTHAADVSCHEPGVPGAVCPLAQRAHPAGPVQVPGQAVLL

SEQ ID NO: 33058 - protein, 63 aa, Homo sapiens
LNLVRWTLGQTARERQARGLTSSTPEFEPYEQWNLGTTKDPDIILSSVIEKRIWDLRRYLLIF

SEQ ID NO: 33059 - protein, 4 aa, Homo sapiens
LILS

SEQ ID NO: 33060 - protein, 183 aa, Homo sapiens
MEKRCRDDSFFGETSRNYHKFDSEYERMGLGHGPDPLQERSLFEKKRGAPPSSNIEDFHGLLLKGYTHLCSICDLPVHSNEELSQHINRASHSRRCQLLLEIYPEWDPDNDTKHTMGDPFMSQQSTNPAPGILGSPPPSFHLGGPAIGPRGNLGAGNGNLQRTRHIQNGRVETSRVVHIMDFQ

SEQ ID NO: 33061 - protein, 98 aa, Homo sapiens
MILFLIMLVLVLFGYGVLSPRSLMPGSLERGFCMAVREPDHLQRVSLPRMVYPQPKVLTPCRKDVLVVPLGWLPLSGRAHSTSTSSTSSSGSRTPPLG

SEQ ID NO: 33062 - protein, 112 aa, Homo sapiens
MLFLISWMSTSISPLYPSLLVWISRYTTASSCSPSLGAGPAGTPRRSPSTVAAAPQRWPPPLTLRWHTSPYPPESPSTCCLYRQALGSWPLALCLQHCHLHVDWEPHSPRTC

SEQ ID NO: 33063 - protein, 6 aa, Homo sapiens
ISEILF

SEQ ID NO: 33064 - skipped

SEQ ID NO: 33065 - protein, 8 aa, Homo sapiens
RNRNCCIV

SEQ ID NO: 33066 - protein, 12 aa, Homo sapiens
ICDDLIPNLNFC

SEQ ID NO: 33067 - protein, 17 aa, Homo sapiens
LRFLLLMRTLSAYAKKF

SEQ ID NO: 33068 - protein, 4 aa, Homo sapiens
KKPK

SEQ ID NO: 33069 - protein, 9 aa, Homo sapiens
ITGLLRIPD

SEQ ID NO: 33070 - protein, 28 aa, Homo sapiens
LKIVIHLPPPLPFFFLELLRSPVGIPAD

SEQ ID NO: 33071 - protein, 31 aa, Homo sapiens
LPYAFVLVLQKGNLTEDHAVLKKYNITEEVD

SEQ ID NO: 33072 - protein, 21 aa, Homo sapiens
MSILLDVDNITINYGEKYIFG

SEQ ID NO: 33073 - protein, 10 aa, Homo sapiens
LVAPKFPGSV

SEQ ID NO: 33074 - protein, 48 aa, Homo sapiens
LGADAVWLWIAPYGQLCPQGRMRIATEVLKSKPNSSHWHTGIRQKAGS

SEQ ID NO: 33075 - protein, 780 aa, Homo sapiens
KFAAGKNGLACLACGPQLEVVNSITGERLSAYRFSGVNEQPPVVLAVKEFSWQKRTGLLIGLEETEGSVLCLYDLGISKVVKAVVLPGRVTAIEPIINHGGASASTQHLHPSLRWLFGVAAVVTDVGQILLIDLCLDDLSCNQNEVEASDLEVLTGIPAEVPHIRESVMREGRHLCFQLVSPTGTAVSTLSYISRTNQLAAGFSDGYLALWNMKSMKREYYIQLESGQVPVYAVTFQEPENDRRNCCYLWAVQSTQDSEGDVLSLHLLQLAFGNRKCLASGQILYEWLEYCEERYTLDLTGGMFPLRGQTSNTKLLGCQSIEKFRSHGDREEGVNEALSPDTSVSVFTWQVNIYGQGKPSVYLGLFDINRWYHAQMPDSLRSGEYLHNCSYFALWSLESVVSRTSPHGILDILVHERSLNRGVPPSYPPPEQFFNPSTYNFDATCLLNSGVVHLTCTGFQKETLTFLKKSGPSLNELIPGGYNRRLVAGLLSPSFVDVQPSSLSQEEQLEAILSTAIQTSSLGLLTGYIRRWITEEQPNSATNLRFVLEWTWNKVVLTKEEFDRLCVPLFDGSCHFMDPQTIQSIQQCYLLLSNLNIVLSCFASEAREITERGLIDLSNKFVVSHLICQYAQVVLWFSHSGLLPEGIDDSVQLSRLCYNYPVIQNYYTSRRQKFERLSRGKWNPDCLMIDGLVSQLGERIEKLWKRDEGGTGKYPPASLHAVLDMYLLDGVTEAAKHSITIYLLLDIMYSFPNKTDTPIESFPTVFAISWGQVKLIQGFG

SEQ ID NO: 33076 - protein, 761 aa, Homo sapiens
VRQGSFTIEKPSPNIPIELIPHINKQTSSTPSSLALTSASRIRERSESLDPDSSMDTTLILKDTEAVMAFLEAKLREDNKTDEGPDTPSYKRDNSISPESDVDTASTISLVTGETERKSTQKRKSFTSLYKDRCSTGSPSKDVTKSSSSGAREKMEKKTKSRSTDVGSRADGHKFVQSSGRIRQPSVDLTDDDQTSSVPHSAISDIMSSDQETYSCKPHGRTPLTSADEHVHSKLEGSKVTKSKTSPVVSGSSSKSTTLPRPRPTRTSLLRRARRGEASDSELADADKASVASEVSTTSSTSKPPTGRRNISRIDLLAQPRRTRLGSLSARSDSEATISRSSASSRTAEAIIRSGARLVPSDKFSPRIRANSISRLSDSKVKSMTSAHGSASVNSRWRRFPTGYASTSEDEFGSDHNSPKHTRLCTSPALKTTRLQSAGSAMPTSSSFKHRIKEQEDYIRDWTAHREEIARISQDLALIAREINDVAGEIDSVTSSGTAPSTTVSTAATTPGSAIDTREEVGDLHGEMHKLVDRVFDESLNFQKIPPLVHSKTPEGNNGRSGDPRPQAAEPPDHLTITRRRTWSRDEVMGDNLLLSSVFQFSKKIRQSIDKTAGKIRILFKDKDRNWDDIESKLRAESEVPIVKTSSMEISSILQELKRVEKQLQAINAMIDPDGTLEALNNMGFPSAMLPSPPKQKSSPVNNHHSPGQTPTLGQPEARALHPAAVSAAAEFENAESEADFSIHFNRVNPDGEEEDVTVHK

SEQ ID NO: 33077 - protein, 6 aa, Homo sapiens
RNCCIV

SEQ ID NO: 33078 - protein, 4 aa, Homo sapiens
KPLR

SEQ ID NO: 33079 - protein, 8 aa, Homo sapiens
LPPFRKLN

SEQ ID NO: 33080 - protein, 13 aa, Homo sapiens
LDPDPKCHVFNVS

SEQ ID NO: 33081 - skipped

SEQ ID NO: 33082 - protein, 25 aa, Homo sapiens
LPYAFVLVLQKGNLTEDHAVLKKYK

SEQ ID NO: 33083 - protein, 159 aa, Homo sapiens
MLQQSKILKVIRKNLVKKCLELFTELAEDKENCKKFYEQFSKNIKLGIQEDSQNRKKLSELLRYYTSASGDEMVSLKDYCTRMKEKQKHIYYITGETKDQVANSAFVERLGKHGLEVIYMIEPIDEYCVQQLKEFEGKTLVPVTKEGLELPEDEEKKKK

SEQ ID NO: 33084 - protein, 425 aa, Homo sapiens
MSCAGVVVCHVPTSSGLGLLGGLSVSAAWRIRLSSSRASDLAPQRREDKPYFDPTLTLFAFFPQPGACQANETIFCELGNPFKRNQRMELLIAFEVIGVTLHTRDLQVQLQLSTSSHQDNLWPMILTLLVDYTLQTSLSMVNHRLQSFFGGTVMGESGMKTVEDVGSPLKYEFQVGPMGEGLVGLGTLVLGLEWPYEVSNGKWLLYPTEITVHGNGSWPCRPPGDLINPLNLTLSDPGDRPSSPQRRRRQLDPGGGQGPPPVTLAAAKKAKSETVLTCATGRAHCVWLECPIPDAPVVTNVTVKARVWNSTFIEDYRDFDRVRVNGWATLFLRTSIPTINMENKTTWFSVDIDSELVEELPAEIELWLVLVAVGAGLLLLGLIILLLWKCGFFKRARTRALYEAKRQKAEMKSQPSETERLTDDY

SEQ ID NO: 33085 - protein, 816 aa, Homo sapiens
MRDLRAQVTSGLLPFPEVTLQALGEDEITLESVLRGKFAAGKNGLACLACGPQLEVVNSITGERLSAYRFSGVNEQPPVVLAVKEFSWQKRTGLLIGLEETEGSVLCLYDLGISKVVKAVVLPGRVTAIEPIINHGGASASTQHLHPSLRWLFGVAAVVTDVGQILLIDLCLDDLSCNQNEVEASDLEVLTGIPAEVPHIRESVMREGRHLCFQLVSPTGTAVSTLSYISRTNQLAAGFSDGYLALWNMKSMKREYYIQLESGQVPVYAVTFQEPENDRRNCCYLWAVQSTQDSEGDVLSLHLLQLAFGNRKCLASGQILYEWLEYCEERYTLDLTGGMFPLRGQTSNTKLLGCQSIEKFRSHGDREEGVNEALSPDTSVSVFTWQVNIYGQGKPSVYLGLFDINRWYHAQMPDSLRSGEYLHNCSYFALWSLESVVSRTSPHGILDILVHERSLNRGVPPSYPPPEQFFNPSTYNFDATCLLNSGVVHLTCTGFQKETLTFLKKSGPSLNELIPGGYNRRLVAGLLSPSFVDVQPSSLSQEEQLEAILSTAIQTSSLGLLTGYIRRWITEEQPNSATNLRFVLEWTWNKVVLTKEEFDRLCVPLFDGSCHFMDPQTIQSIQQCYLLLSNLNIVLSCFASEAREITERGLIDLSNKFVVSHLICQYAQVVLWFSHSGLLPEGIDDSVQLSRLCYNYPVIQNYYTSRRQKFERLSRGKWNPDCLMIDGLVSQLGERIEKLWKRDEGGTGKYPPASLHAVLDMYLLDGVTEAAKHSITIYLLLDIMYSFPNKTDTPIESFPTVFAISWGQVKLIQGFG

SEQ ID NO: 33086 - protein, 748 aa, Homo sapiens
KDLLVAAEAFSELNHLSPVQGTEASLCAPSVYEGKIFTQKSKVPVLDEGLTSVETYTSAIRANDNKSMADVLGDGGNSSLTISEGPIVSERRLNQEVALNLKEDHEVEVGVLKESVDLPEEKLPISDSPPDTQEIHVIEQEKLEAQDSGEEARNLSFNELYPSGTLKLQYNFDTIDQQFCDLADNKDTAECDIAEVDGELFVAPSNFTLILEGEEGEVEPGDFASSDVLPKAANTATEEKLVCSGKNDNHGQVANLPSAVTSDQKSQKVETLPYVPEPIKVAIAENLLDVIKDTRSKEITSDTMEQSIHETIPLVSQNIMCPTKLVKSAFKTAQETSTMTMNVSQVDDVVSSKTRTRGQRIQNVNVKSAQQEASADVATPKMPGQSVKKKTRKAKEISEASENIYSDVRGLSQNQQIPQNSVTPRRGRRKKEVNQDILENTSSVEQELQITTGRESKRLKSSQLLEPAVEETTKKEVKVSSVTKRTPRTIKRSVENQESVEIINDLKVSTVTSPSRMIRKLRSAHLDASENTGNKQEDKSSDKQLPIKHIRRVRGREVSPSDVRENSNLESSQLTLQAEFDMSAIPRKRGRPRKINPSEDVGSKAVKEERSPKKKEAPSIKRRSTRNTPAKSENVDVGKPALGKSILVPNEELSMVMSSKKKLTKKTESQSQKRSLHSVSEERTDEMTHKETNEQEERLLATASFTKSSRSTRTQSSKAILLPDLSEPNNEPLFSPAAEVPRKQKLKK

SEQ ID NO: 33087 - protein, 7 aa, Homo sapiens
LPPYKIT

SEQ ID NO: 33088 - protein, 902 aa, Homo sapiens
KVFTMQDLLQLIKINPTSSLYKSLVSGADKENQKGFLMHFLKGLAEYHQAKESCNMETQTSSTFSRDSLAEKLQLIDDQFADAYPQRIKFESLEIKLNEYKREIEEQLREEICQKLKFFKDTEIGKIKMEAKKKYEKELAVFQNDFEKACQAKSEALVIREKSTLERIQKHQEIETKEIYAQRQLLLKDMDLLRGREAELKQRVEAFELNQKLQEEKHKSMTEALRRREQNIKSFEKTYDQKLKNELLKYQLELKDDYIIRTNRLIEDERKNKEKAVHLQEELIAFNSKKEELNQSINRMKELELELESVKAQSLAITKQNHMLNEKVKVMSDYSLLKEERLELLAQNKLLKQQLEESRNENLRLLNRLAQLAPELAVFQKELRRAEKATVVEHEEFESRKQALHKQLQDEIEHTTQLKAQILGYKVSIKRLTIQVADLKSQLKQTQTALENEVYCNPKQSVIHHSANGLINGNMVLHNGEISGDFLNNPFKQEKVLAGTVASRITNYPNAGMEGSSPDSDLEFVANTNARVKQLQQEAERLEKAFRSYHRRDIKNSAKGPLPAKSPPSLHLLEAFKNITSSSPERRIFAEDRVVSEQPQVGTLKEERNDILEALTGSAASRLCGGTSSRRLSSTPLPKAKRSLESEIYLEGLGRSHIASPSPYPDRMPPPSPAESRHNLSIPPFSSPPEQKAGLYWRQNELQDKSEFSDADKLAFKDNEEFESSFEYARNVPRQFEMDGPSPAGDMLHMGAAVAAVPLSYQHPSVDQKQIEEQKEEEKIWEQQVKERKQREERRQSNLQEILERERRELEKLYQERRMTEESLKIEMENELEMSNQEMKDKSAHSENPLEKYMKIIQQDQESADKSSKKMVQEGSLVDTLQCSDKVESLTRFSHEEPDDSW

SEQ ID NO: 33089 - skipped

SEQ ID NO: 33090 - protein, 232 aa, Homo sapiens
KRMKKLGQQYKERIRNAELFLQLETEQVGRNYMKEKKAAVKEFEDKKVELKENLIAELAEEKKMIENEMLTMELNGDSMQVRPIMTRKLRRRPNDPVPIPDKRRKPAPAQLNYLLTDEQIMEDLRTLNKLKSPKRPASPSSPEHLPATPAESPAQRFEARIEDGKLHYDKRWYHKSQAIYLESKDNQKLSCVISSVGANEIWVRKTSDSTKMRIYLGQLQRGLFVIHRRSAA

SEQ ID NO: 33091 - protein, 14 aa, Homo sapiens
LSLIEEFCIFYQCP

SEQ ID NO: 33092 - protein, 424 aa, Homo sapiens
KLENCWRKYAVEGVKNSFSQKSNFREITMRYVKTLSRENGQKFNAVGENCITDSNPAKHLRGSREESLHPSVSSVENLQQHEDLINLQSFQLGERAYQTDVLVKVPRQSSVLSENQRMNNPERWFESTGCGKTYNQNRAFNQHQRFHSGEKTYEHNECGKAFSWPSILSKHQRIHTGKKLYTCEDCGKSFSVHSYFIQHCKIHTREKPYECIKCGKAFSTHSSYVQHLKIHTGEKHHECNQCGKAFSHSSNLIHHQRIHSGEKPYKCKECGKAFNRQSNLIQHQRIHSGEKPYDCKECGKAFSTQLFLIQHQRIHTGEKPYECNECAKSFSLNRTLTVHQRIHTGEKPYRCNECGKSFSQCSQVIQHKRIHTGEKPYICNECGKSFGARLSLIQHQRIHTGEKPYGCSVCGKTFSQKGHLIQHQ

SEQ ID NO: 33093 - protein, 8 aa, Homo sapiens
TEVIQDQE

SEQ ID NO: 33094 - protein, 13 aa, Homo sapiens
LNRFQLYAGVTGM

SEQ ID NO: 33095 - protein, 171 aa, Homo sapiens
KLERIKDYLLMEEEFIRNQEQMKPLEEKQEGKRSKVDDLRGTPMSVGILEEIIDDNHAIVSTSVGSEHYISILSFADKDLLEPGCSVRLNHKVHTMIGVLMDDMDPLVTVMKVEKAPQETYADTGGLDNQIREIKESVELPLTHPEYYEEMGIKPPRGSFSVVHLAQVKPC

SEQ ID NO: 33096 - skipped

SEQ ID NO: 33097 - protein, 9 aa, Homo sapiens
LLLFFVRHT

SEQ ID NO: 33098 - protein, 462 aa, Homo sapiens
IHDFECQCHNDERNYREIPAIKIKNITGRRDQGDGRNAGNKPVENQLELSFWLHLAELQGFQIERKIYECNQIEKSVTRGSSVSLLQTNLPCVNTSISNIYRNDFMHPSLLTQDQKAYIREKPYKCSDCGKAFNQRSNLTTHQRIHTGQKPHKCDICGKGFRRIANLASHHRIHTGEKPYRCNECGKTFNQTFNLTTHQRIHTGQKPYKCDRCGKGFRQIGNLASHHRIHTGEKPYRCNECGKTFNRMFHLTRHQRIHTGQKPYKCDICGKGFRQIANLASHHRIHTGEKPYKCSDCGKTFNYRSHLTRHQRIHTGQKPYKCDTCGKDFSQNSYLENHQRIHTREKSYRCNECGKTFNKMTNLTTHQRIHTGQKTYKCDICGKGFRQIGNLASHHRIHTGEKPYRCNECGKTFNRMFHLTRHQRIHTGQKPYKCDICGKSFSQNSYLENHQRIHTGEKTYKL

SEQ ID NO: 33099 - protein, 291 aa, Homo sapiens
VVCREASHAGSWYTASGPQLNAQLEGWLSQVQSTKRPARAIIAPHAGYTYCGSCAAHAYKQVDPSITRRIFILGPSHHVPLSRCALSSVDIYRTPLYDLRIDQKIYGELWKTGMFERMSLQTDEDERSIEMHLPYTAKAMESHKDEFTIIPLLVGALSQKNRNSELFSKYLADPSNLFVVSSDFCHWGQRFRHSYYDESQGEICRSIEHLDKMGMSIIEQLDPVSFSNYLKKYHNTICGRHPIGVLLNAITELQKNGMNMSFSFLNYAQSSQCRNWQDSSVSYAAGALTVH

SEQ ID NO: 33100 - protein, 1844 aa, Homo sapiens
ILAMEEALNWIKYAGDVTILTKLGSIDNCWPMLSIFFTEYKYHITKIVMEDCNLLEELKTQSCMDCIEQGELMKMKGNEEFSKERFDIAIIYYTRAIEYRPENHLLYGNRALCFLRTGQFRNALGDGKRATILKNTWPKGHYRYCDALSMLGEYNWALQANITAQKLCKNDPEGIKDLIQQHVKLQKQIEDLQGRTANKNPIKAFYENRAYTPRSLSAPVFSTSLNFVEKERDFRKINHEMANGGNQNLKVMDEALMVDDCDCHPEFSPPSSQPPKHKGKQKSRNNESEKFSSSSQLTLPADLKNILEKQFSKSSRGAHQDFANIMTMLRSLIQDGYTALLEQRCRSAAHAFTELLNGLDPQKIKQLNLAMINYVLVVYGLAISLLGIGQPEELSEAENQFKRIIEHYHNEGLDCLAYCGIGKVYLKKNRFLEALNHFEKARTLIYRLPGVLTWPTSNVIIEESQPEKIKMLLEKFVEECKFPPVPDAICCYQKCCGYSKIQIYITDPDFKGFIRISCCQYCKIEFHMNCWKKLKTTTFNDKIDKDFLQGICLTPDCEGVISKIIIFSSGGQVKCEFEHKVIKEKVPPRPILKQKCSSLEKLRLKEDKKLKRKIQKKEAKKLAQERMEEDLRESNPPKNEEQKETVDNVQHCQFLDDRILQCIKQYADKIKSGIWNTATLLKELLSWKVLSTEDYTTCFSSRNFLNEAVDYVIRHLIQEKNRVKTRIFLHVLSELKEVEPKLAAWIRKLNSFGLDATGPFFSRYEASLKQLDFSIMTFLWNEKYGHKLDSIEGKQLDYFFEPTSSKEARCLIWLLEEHRDKFPALHSALDEFFDIMDSRCTVLRKQDSGEAPFSSTKVKNKGKKKKPKDSKPMLVGSGTTSVTPNNEIITSSEDHSNQNSDTAGPFAVPDHLRQDVEEFEALYDQHSNEYVVRNKKLWDMNPKQKCSTLYDYFSQLLEEHGPLDMSHKMFSEEYEFFPEETRPILEKAGGLKSFLLGCPRFVVIDNCIALKKVASRLKKKRKKKNIKTKVEDISKAGEYLQVKLPLNSAAREFKPDVKSKPVSGSSSAPASEDVKPKPLSANSPKPACEDVKAKPVSDNSSRQVSEDGKPKGFSSNSPKPGSEDANYKRVSSNSPKPVLEDVKPTYWAQSHLVTGYCTYLPFQRFDNTRTSPAYINVLPGLPQYTSIYTPLVSLSPEYQLPRSVPVVPSFVANDRADKNATAYFEGHHLNAENAAGHQIASETQILEDSSLISVKSQCSTGDAHTVLSESNRKDGHCGNSNNKCEVIPESTSAVTNIPQVQMVAIQVSWNITHQEVNTEPYNPFEKQQGEISRIEKEYQVLQDQLKEAYENYEQIKLKGLEETRDLEEKLKRHLEENKISKTELDWLLQDLEREIKKWQEEKKEIQKTLKSLKKKIKKVSNANEMYTQKNDGNDKEHELHLDQSLEISNTLTNEKMKIEECIKKGKKDYEESHQRAVAAEVSVLENWKESEVYKLQIMQSQAEAYLKKLELISHDPAAYPDMESDICSWELFLSNVTKETEKAKYQFEEQIKAIKNGSRLSELSKVQISELSFPACNTVHPELLPESSGHDDQGFMTSASDVTGNQAALHRDPSVFSAGDSPGEAPSALLPGPPPSQPEATQLPGPKGAGQAALSEQSPAADQKQPVPPGCAACSSQSPKKPFNSIIEHLSVVFPCYNSTELAGFIKKVRSKNKNSLSGLSIDEIVQRVTEHILDEQKKKKPNPGKDKRTYEPSSAAHVTRSSQGPPLAVVAPSPKTKGQKAEDVPVRVALGASSCEICHEVFKSKNVRVLKCGHKYHKGCFKQWLKGQSACPACQTCDLLSEE

SEQ ID NO: 33101 - protein, 18 aa, Homo sapiens
LFCRKSAVFVLKALEFGI

SEQ ID NO: 33102 - protein, 37 aa, Homo sapiens
ILPHIQNEIHAQRCQEESRQTGLSRLYKKHDASICFW

SEQ ID NO: 33103 - protein, 15 aa, Homo sapiens
LGPLCSPAIARAALT

SEQ ID NO: 33104 - skipped

SEQ ID NO: 33105 - protein, 26 aa, Homo sapiens
KKHSKQATVFKKLNWQVEMFKQFSDL

SEQ ID NO: 33106 - protein, 35 aa, Homo sapiens
LSFLSTTWLKTWRSQQYKESKSRSCAREQMNSSSC

SEQ ID NO: 33107 - protein, 62 aa, Homo sapiens
LLGPLSLCGVYICFHKSVLFFSLFCLCISSNCLFKMPRIWTPSTSNRHWEGEGRKAECKMKW

SEQ ID NO: 33108 - protein, 40 aa, Homo sapiens
RGKHHRTSANTGLKIVIHLPPPLPFFFLELLRSPVGIPAD

SEQ ID NO: 33109 - protein, 4 aa, Homo sapiens
IFNI

SEQ ID NO: 33110 - protein, 296 aa, Homo sapiens
MDEGPDLDLGPPVDPDEDSDNSAIYVQGLNDNVTLDDLVDFFKQCGVVKMNKRTEQPMIHTYLDKETRKPKGDATVSCEDSPTAKAAVEWFDGKDFQGSKLKVSLARKRPPVNSMQGGMPPHEGRGMPPPLCGGPGGPGSPGGPMGHMGGRGGDRGGLPPRGPQGSRGNTSGGGNVQHQAGDRQCPNPGCGNQNFAWRTESNKCKAPKPEGFLPPPFPPPGGDHGRGGPGGMWGGRGGLMDHGGPGGMFRGGCGRDRSGFCGGWAWTEVALVEEDKVALGGPRTFDVTNGRKKRRT

SEQ ID NO: 33111 - protein, 76 aa, Homo sapiens [sequence omitted]

SEQ ID NO: 33112 - protein, 48 aa, Homo sapiens
MSLSLCAPRIFRAPTPVPRGPRLGAGPPTSAETQSVERSPPSPHPQPL

SEQ ID NO: 33113 - protein, 12 aa, Homo sapiens
MCILVVTRLPRI

SEQ ID NO: 33114 - protein, 148 aa, Homo sapiens
MIAHFSVFRRFPISRGPSCALWFPAVTRAFSTQRMEGIYTHTHPSPSPQLWNKHSKSSILVGEMGNSYLSLTFILQTTYSFSRHGTHLVLFGFFFGFVVVVSVWAWFCLFLETRSRSVAQGWSAVARSWLTEASTSRAQAILLPQPPG

SEQ ID NO: 33115 - protein, 407 aa, Homo sapiens
MSVGIKWEDRNIEDQYKNSRRNPRNHMAERLCECKDGQCGETFSLIPDGIMNKNTLPGVKPCESSVCGEGNVDHSSLNCYIRADTGHKPYECQEHGEKPHKCKQCVKTFSCLHSFQTHEKPHTGEKPYDCKEWEKTFDSPQTVRRYRVVHSGDGPYKCKFCGKAFDNLSLYLTHERSHTGQKPYECNECGKAFGFPSSFHRHERMHTGEKPYECKQCGKTFSCSSSIKKHERIHTGEKPYECKQCGKAFASSNSFQYHERTHTGEKPYECKQCGKAFNCSSSLRKHARIHTGEKPYICKQCGKAFRFPSSIKNHEKTHTGEKPYECQECGKAFRYSSSLRVHKRIHTGEKPYECEDCGKAFSHPTTFHRHKITHTAEKPYECQECGEAFRYPVAFRRHKITHTAEKL

SEQ ID NO: 33116 - protein, 69 aa, Homo sapiens
MGSELFCQVPVDLPGKLPVSFQLPCGAAASAGPKRTGSSSSFTLRPSSGRDARAGLPEEVAKLLLRVFE

SEQ ID NO: 33117 - protein, 26 aa, Homo sapiens
ILLFMILLTATSASQVQAILLPQPPK

SEQ ID NO: 33118 - protein, 21 aa, Homo sapiens
VRLFFFSFLVVCTSLGMEGNK

SEQ ID NO: 33119 - protein, 6 aa, Homo sapiens
LGSASI

SEQ ID NO: 33120 - protein, 48 aa, Homo sapiens
VMFSPQELTGEGMGQDPSLCKASVTVMFQVFLMTVCLYLTEQLVAIYH

SEQ ID NO: 33121 - protein, 43 aa, Homo sapiens
RPDGDTFLLSFLSTTWLKTWRSQQYKESKSRSCAREQMNSSSC

SEQ ID NO: 33122 - protein, 59 aa, Homo sapiens
VGGGGVEGRGAQARTNPHVPGRDPDPAAYREAKPAGWAAEPESGTVWSPLELRSGCSAS

SEQ ID NO: 33123 - protein, 42 aa, Homo sapiens
KGREGSLKIFFTSGYPVVPRGPAAGPGDLSRTLLFFSESVLR

SEQ ID NO: 33124 - protein, 71 aa, Homo sapiens
TGDWKGLRITVKLTIQNRQAQIEVVPSASALIIKALKEPPETERNRKTLNTVGISLLMRSSTLLDRWSTDP

SEQ ID NO: 33125 - protein, 46 aa, Homo sapiens
ITCAWRGGDSSSHPLVSGHILSNSPVAAVMCSSMGTHLSPFKGTLL

SEQ ID NO: 33126 - protein, 18 aa, Homo sapiens
IEKIGKLEDKNILLEEKR

SEQ ID NO: 33127 - protein, 6 aa, Homo sapiens
ITCPRV

SEQ ID NO: 33128 - protein, 27 aa, Homo sapiens
LGFIFKGMKQLRLFWKTFWQLVKLEYN

SEQ ID NO: 33129 - protein, 96 aa, Homo sapiens
MDKKSTHRNPEDARAGKYEGKHKRKKRRKQNQNQHRSRHRSVTSFSSDDPMFPSSSSSSSGSQTDSSIEDAAKGKIKKKRREKTNKWEKRKVSNCE

SEQ ID NO: 33130 - protein, 91 aa, Homo sapiens
MSSNLSTEINLQLKSDDLKLESLILNINEHFLSHIFLGILRSKCVIYWSMKCDCKYSLLYIMSIYLHSSSMPKLESLVLMIILSTGSPRFP

SEQ ID NO: 33131 - protein, 184 aa, Homo sapiens
MEAGIHYVEAVFSMGPVTPAHAGAYRCCGCFSHSRYEWSAPSDPLDIVITGKYKKPSLSTQVDPMMRLGEKLTLFCSSEISFDQYHLFRHGVAHGQWLSGGQRHREAFQANFSVGRATPVPGGTYRCYGSFNDSPYKPPVTRCNFTPQETLRVLLCHSQNPPLNLTHLALKDSPATCICSLDSQ

SEQ ID NO: 33132 - protein, 17 aa, Homo sapiens
MCSSMGTHLSPFKGTLL

SEQ ID NO: 33133 - protein, 712 aa, Homo sapiens
TASLRSCCDSPLPFSRVTPVVPRLPRANLCGCRHRRVEFPASGRTELFSRIQCSVSSPQSQSGADREQGTGMAKAAAIGIDLGTTYSCVGVFQHGKVEIIANDQGNRTTPSYVAFTDTERLIGDAAKNQVALNPQNTVFDAKRLIGRKFGDPVVQSDMKHWPFQVINDGDKPKVQVSYKGETKAFYPEEISSMVLTKMKEIAEAYLGYPVTNAVITVPAYFNDSQRQATKDAGVIAGLNVLRIINEPTAAAIAYGLDRTGKGERNVLIFDLGGGTFDVSILTIDDGIFEVKATAGDTHLGGEDFDNRLVNHFVEEFKRKHKKDISQNKRAVRRLRTACERAKRTLSSSTQASLEIDSLFEGIDFYTSITRARFEELCSDLFRSTLEPVEKALRDAKLDKAQIHDLVLVGGSTRIPKVQKLLQDFFNGRDLNKSINPDEAVAYGAAVQAAILMGDKSENVQDLLLLDVAPLSLGLETAGGVMTALIKRNSTIPTKQTQIFTTYSDNQPGVLIQVYEGERAMTKDNNLLGRFELSGIPPAPRGVPQIEVTFDIDANGILNVTATDKSTGKANKITITNDKGRLSKEEIERMVQEAEKYKAEDEVQRERVSAKNALESYAFNMKSAVEDEGLKGKISEADKKKVLDKCQEVISWLDANTLAEKDEFEHKRKELEQVCNPIISGLYQGAGGPGPGGFGAQGPKGGSGSGPTIEEVD

SEQ ID NO: 33134 - protein, 16 aa, Homo sapiens
RALPGTVSSLRSVPPR

SEQ ID NO: 33135 - protein, 64 aa, Homo sapiens
RITVKLTIQNRQAQIEVVPSASALIIKALKEPPETERNRKTLNTVGISLLMRSSTLLDRWSTDP

SEQ ID NO: 33136 - protein, 91 aa, Homo sapiens
LGKTVGSSDMRNMIPQDNENPPQQGEANQNDSVAFEDVAVNFTPDEWALLDPSQKNLYREVMQETLRNLASIEVLWKRDSLKVKVISMEKF

SEQ ID NO: 33137 - protein, 93 aa, Homo sapiens [sequence omitted]

SEQ ID NO: 33138 - protein, 120 aa, Homo sapiens
MIGCTQPRRVAAMSVAKRVSEEMGGNLGEEVGYAIRFEDCTSENTLIKYMTDGILLRESLREADLDHYSAIIMDEAHERSLNTDVLFGLLREVRAVWFGLSAHGVLTSAPPVASGLLQVG

SEQ ID NO: 33139 - protein, 17 aa, Homo sapiens
LLARTRRVFPPTASRWW

SEQ ID NO: 33140 - protein, 45 aa, Homo sapiens
MDPELREGSRMDTQGHRGSNSETRTSRVSREASGISRCGGWRRGG

SEQ ID NO: 33141 - protein, 14 aa, Homo sapiens
LLRSLLESHVQAVL

SEQ ID NO: 33142 - protein, 31 aa, Homo sapiens
LLTGDDTCVGCWHSCYLTREGGDFACDGLPV

SEQ ID NO: 33143 - protein, 25 aa, Homo sapiens
ILSQRFGRNCFLSGSPEYPEESVWN

SEQ ID NO: 33144 - protein, 9 aa, Homo sapiens
LFFSESVLR

SEQ ID NO: 33145 - protein, 23 aa, Homo sapiens
MTVMKCRGPGCPQVSWQCVILRR

SEQ ID NO: 33146 - protein, 29 aa, Homo sapiens
MGVLGALSFFFFKFIIFLFSQVFFPFFFF

SEQ ID NO: 33147 - protein, 265 aa, Homo sapiens
MKTSYFSLLSFFFFCLGFCLNQKICPHAGAQDKFSLSAWPSPVVPLGGRVTLSCHSHLRFVIWTIFQTTGTRSHELHTGLSNNITISPVTPEHAGTYRCVGIYKHASKWSAESNSLKIIVTGLFTKPSISAHPSSLVHAGARVDPMMRLGEKLTLFCSSEISFDQYHLFRHGVAHGQWLSGGQRHREAFQANFSVGRATPVPGGTYRCYGSFNDSPYKPPVTRCNFTPQETLRVLLCHSQNPPLNLTHLALKDSPATCICSLDSQ

SEQ ID NO: 33148 - protein, 56 aa, Homo sapiens
MGYMLSYRVSLCRPGWSAVARDLGSLQAPPPGFTPFSCLSLLSSWDYRRPPPHPDG

SEQ ID NO: 33149 - protein, 56 aa, Homo sapiens
MGYMLSYRVSLCRPGWSAVARDLGSLQAPPPGFTPFSCLSLLSSWDYRRPPPHPDT

SEQ ID NO: 33150 - protein, 70 aa, Homo sapiens
MLSGISLEGTGRMGRQAGSEVRGPILPLPPCCSLTDSEGQNNGLPDSQAPPRGSPQERLEAEEFTEATAS

SEQ ID NO: 33151 - protein, 34 aa, Homo sapiens
LSLVVIRIHQNPCLDLSLAEAALFPTERVSLSSC

SEQ ID NO: 33152 - protein, 53 aa, Homo sapiens
IKNCSGLLEMVKTTKKTMAFIWTDKMKEREKAVVCRQIWFGICLLMTPDMMSF

SEQ ID NO: 33153 - protein, 83 aa, Homo sapiens
VSPSLPPRKPGLFPRSLGLQHHACCSRQRAGSHRLCGSWLQRLWSCRASFCICSTARPSPSCSPEQLGGSVGGRRGMPVGLFH

SEQ ID NO: 33154 - protein, 25 aa, Homo sapiens
LIPCFQKIFLTVFASYKIVLSLRKG

SEQ ID NO: 33155 - protein, 60 aa, Homo sapiens
IGEYSVTELKDSCRRLSQSVAMCKTGCLPGRPRNIWPSRPRLYPSKFPLYPEFLELVSKG

SEQ ID NO: 33156 - protein, 5 aa, Homo sapiens
MTRRL

SEQ ID NO: 33157 - protein, 67 aa, Homo sapiens
ISKTTGIFFLLYHPEQQDQYILYFLLFSLLVKTRMKTSMMSHLHLMTVSHWPATCSSLCLPDYNNSM

SEQ ID NO: 33158 - protein, 74 aa, Homo sapiens
ISGKTESKKSRVLAPVGLRVEAGGVWVPSSSDRWMDLSSKRKEETRWQISLKPKIACEAIIRRNKNRHKNRGKE

SEQ ID NO: 33159 - protein, 263 aa, Homo sapiens
VGPHLGLETGNGRGIINLNAFDPTLPKTMTQFLEQGEATLSVARRALAAQLPVLPRSEVTFLAPVTWPDKVVCVGMNYVDHCKEQNVPVPKEPIIFSKFASSIVGPYDEVVLPPQSQEVDWEVELAVVIGKKGKHIKATDAMAHVAGFTVAHDVSARDWLTRCNGKQWLLGKTFDTFCPLGPALVTKDSVADPHNLKICCRVNGEVVQSSNTNQMVFKTEDLIAWVSQFVTFYPGDVILTGTPPPPPRCRCIQETSCLSQEGG

SEQ ID NO: 33160 - protein, 7 aa, Homo sapiens
IIVPLHR

SEQ ID NO: 33161 - protein, 35 aa, Homo sapiens
KSLGALWMCRRVGLPFYRPFAELRGQSRRQSRKQP

SEQ ID NO: 33162 - protein, 5 aa, Homo sapiens
LVISE

SEQ ID NO: 33163 - protein, 8 aa, Homo sapiens
IQESWTDH

SEQ ID NO: 33164 - protein, 26 aa, Homo sapiens
VSWGSFVKFLLMWVNLSLIQLLPYID

SEQ ID NO: 33165 - protein, 8 aa, Homo sapiens
LAVLDDHG

SEQ ID NO: 33166 - protein, 1146 aa, Homo sapiens
TPLFPPISSLHTHFPFAEERRGGGERRDRRKREKFLTEISFRGCGGEEEGKKRAGRPLLPPSLLSLSFSPFLTRPPTPPAAGDAARESAGPGSVSSAAAAAAAALRLGIPKRRTPFLSFSRSARLSAFVPRGRPARRLRPSPCVRPSRPASLGLRLSTRAFLRTRGPARPLRPQRLPFPSPPLLPPPSPTLPTPFSCPEARCACACVCPSANAATSARQMNSVRAANRRPRRVSRPRPVQQQQQQPPQQPPPQPPQQQPPQQQPPPPPQQQQQQQPPPPPPPPPPLPQERNNVGERDDDVPADMVAEESGPGAQNSPYQLRRKTLLPKRTACPTKNSMEGASTSTTENFGHRAKRARVSGKSQDLSAAPAEQYLQEKLPDEVVLKIFSYLLEQDLCRAACVCKRFSELANDPILWKRLYMEVFEYTRPMMHPEPGKFYQINPEEYEHPNPWKESFQQLYKGAHVKPGFAEHFYSNPARYKGRENMLYYDTIEDALGGVQEAHFDGLIFVHSGIYTDEWIYIESPITMIGAAPGKVADKVIIENTRDSTFVFMEGSEDAYVGYMTIRFNPDDKSAQHHNAHHCLEITVNCSPIIDHCIIRSTCTVGSAVCVSGQGACPTIKHCNISDCENVGLYITDHAQGIYEDNEISNNALAGIWVKNHGNPIIRRNHIHHGRDVGVFTFDHGMGYFESCNIHRNRIAGFEVKAYANPTVVRCEIHHGQTGGIYVHEKGRGQFIENKIYANNFAGVWITSNSDPTIRGNSIFNGNQGGVYIFGDGRGLIEGNDIYGNALAGIQIRTNSCPIVRHNKIHDGQHGGIYVHEKGQGVIEENEVYSNTLAGVWVTTGSTPVLRRNRIHSGKQVGVYFYDNGHGVLEDNDIYNHMYSGVQIRTGSNPKIRRNKIWGGQNGGILVYNSGLGCIEDNEIFDNAMAGVWIKTDSNPTLRRNKIHDGRDGGICIFNGGRGLLEENDIFRNAQAGVLISTNSHPILRKNRIFDGFAAGIEITNHATATLEGNQIFNNRFGGLFLASGVNVTMKDNKIMNNQDAIEKAVSRGQCLYKISSYTSYPMHDFYRCHTCNTTDRNAICVNCIKKCHQGHDVEFIRHDRFFCDCGAGTLSNPCTLAGEPTHDTDTLYDSAPPIESNTLQHN

SEQ ID NO: 33167 - protein, 42 aa, Homo sapiens
LLFKFQIDIPDKRCLSPCLSSDLHSTVPGKVEPPASPCPSRC

SEQ ID NO: 33168 - protein, 5 aa, Homo sapiens
LVISE

SEQ ID NO: 33169 - protein, 8 aa, Homo sapiens
IQESWTDH

SEQ ID NO: 33170 - protein, 245 aa, Homo sapiens
LSRGRGAGGMALVPYEETTEFGLQKFHKPLATFSFANHTIQIRQDWRHLGVAAVVWDAAIVLSTYLEMGAVELRGRSAVELGAGTGLVGIVAALLALKSSMKPLLVHCLLFFSGAHVTITDRKVALEFLKSNVQANLPPHIQTKTVVKELTWGQNLGSFSPGEFDLILGADIIYLEETFTDLLQTLEHLCSNHSVILLACRIRYERDNNFLAMLERQFTVRKVHYDPEKDVHIYEAQKRNQKEDL

SEQ ID NO: 33171 - protein, 15 aa, Homo sapiens
KKAKKPALVAKSSIL

SEQ ID NO: 33172 - protein, 72 aa, Homo sapiens
VARSRAGAGPGHGRLGAAVRVVAALLRAEGPGLPAAVAEGLCRCLQEEHLTVLSGATKARGGRCRGPAATTG

SEQ ID NO: 33173 - protein, 63 aa, Homo sapiens
LGLATAPLAHGTSSGAWGPEGPGLPAAVAEGLCRCLQEEHLTVLSGATKARGGRCRGPAATTG

SEQ ID NO: 33174 - protein, 45 aa, Homo sapiens
IQTVGARSASGRRRLAVATGCGRLDSGDCVWLHMLRFPLPVVLGL

SEQ ID NO: 33175 - protein, 78 aa, Homo sapiens
TATSGWPRGALARLFLRPRGPRSPIIQFRRVTGAAVASQGAGSLSPALLPLAPSPRPRRAGLRGQGPSGEGRDGVSPC

SEQ ID NO: 33176 - protein, 76 aa, Homo sapiens
IIQFRRVTGAAVASQGAGSLSPALLPLAPSPRPRRAGLRGQGPSGEGYHLTWKKMSSLEKKHSNVIVQNSLNIHNR

SEQ ID NO: 33177 - protein, 49 aa, Homo sapiens
RLQETYNQHSTQTMPRPPETMCQARIALDRCNLRTAFILFSLILSHYVF

SEQ ID NO: 33178 - protein, 83 aa, Homo sapiens
TAPLPSSLGKKSETPSQKKKNMAETRKLRDGATAPLLPACVRKVSLRGAPAPASGGEGGTCRGRSSEALGPLCSPAIARAALT

SEQ ID NO: 33179 - protein, 13 aa, Homo sapiens
LWQAAEGDLLLLL

SEQ ID NO: 33180 - protein, 29 aa, Homo sapiens
LPRPAAPSPASALSLRQSLSIKPGAKRGS

SEQ ID NO: 33181 - protein, 62 aa, Homo sapiens
IFFCLLRSSLALFFSFPISDLFQGESGFGGRGRKVGLQDQPPPTTIKTTRIFFCKFLTALNS

SEQ ID NO: 33182 - protein, 101 aa, Homo sapiens
IRPRAAGTEGLGLGTPRPPPARPPTPGRALSARGTRLGLLRLPLPGSRRPQLSPAPPGCNGAAPPAEPLWCLLTLGPSFSCSHLWPQASALGGSRCAGQMD

SEQ ID NO: 33183 - protein, 40 aa, Homo sapiens
LRCSHLPRRPPFHIQQRRRGQPLRRFFTRCILVVTRLPRI

SEQ ID NO: 33184 - protein, 110 aa, Homo sapiens
KTRLLGRMWEKRRVASSRGSSKRDCRAVRDPDKGGPRQQFRRSGGSRAEACGRWREGHEANRRVEMDPELREGSRMDTQGHRGSNSETRTSRVSREASGISRCGGWRRGG

SEQ ID NO: 33185 - protein, 42 aa, Homo sapiens
LFCLNPSTAGRLINHTENVEGFMGEGVEMWVFETKVYKQMNC

SEQ ID NO: 33186 - protein, 5 aa, Homo sapiens
LNMPP

SEQ ID NO: 33187 - protein, 56 aa, Homo sapiens
LPPPSPLGLSGWISPPLLLPRRSTEGAAKRAVSANPASLCGGLCHRAMGPEVPGPG

SEQ ID NO: 33188 - protein, 66 aa, Homo sapiens
RYPTLWDRCRKRWLRPIFTQLLAAGLAYHTLLPIPSEPLFAAPGEHLHQCFVKESYCPPRVLAKEQ

SEQ ID NO: 33189 - protein, 26 aa, Homo sapiens
KSFPRLAENKLPGRRMRRQETNCLES

SEQ ID NO: 33190 - protein, 60 aa, Homo sapiens
IKQLFCRLDYKDTIAVARFIVFLASSSTSRDGKPCIFLKAFEDLKSTVYVLCRKNFEYQL

SEQ ID NO: 33191 - protein, 14 aa, Homo sapiens
MKNKGYLINMDLNM

SEQ ID NO: 33192 - protein, 51 aa, Homo sapiens
ICVLNPIHKEAIMSQPLFLRFTDVRVQFTRMPSYTGLWNQKLQLVIKCDAI

SEQ ID NO: 33193 - protein, 32 aa, Homo sapiens
IANCSVQLSHSCLFPCISEHQANTSRETWKKK

SEQ ID NO: 33194 - protein, 64 aa, Homo sapiens
LRLPPLPAMYLPCLAVGHVGLPGGRPRGVTFPCHFARRPLPTPTPGCTAQAAAGQRGLWAMDTG

SEQ ID NO: 33195 - protein, 35 aa, Homo sapiens
VPRDPRHLPVDFLAERMLAVPVTCGDTARSALQIY

SEQ ID NO: 33196 - protein, 86 aa, Homo sapiens
RRLKRCPSRWLCLSAAWSFVQVFSEPDGFTVIFSGLGNNAGGTMHWNDTRPAHFRILKVVLREAVAECLMDSYSLDVHGGRRTAAG

SEQ ID NO: 33197 - protein, 128 aa, Homo sapiens
VRGGGRGGRSAGCRREEALHQGPRRHSFNHIRASAGNACWRLSPVPSILKGKKALPTHSPAPRSWSRRSRAHGVQPVADPVPRAVGEMDVVCGTRRGRRRGRGWRARGRPRGGGFASRDQILEFQLGF

SEQ ID NO: 33198 - protein, 5 aa, Homo sapiens
LFPQP

SEQ ID NO: 33199 - protein, 6 aa, Homo sapiens
IKCPFH

SEQ ID NO: 33200 - protein, 47 aa, Homo sapiens
VGELSEALYAWPTQTRNLRTKQPTLLLLWGFNGQGRLEKGCSAFPFS

SEQ ID NO: 33201 - protein, 39 aa, Homo sapiens
RGHCQDHASLFISRFLSSAIVVFWWRKKNRVAVFELPGT

SEQ ID NO: 33202 - protein, 26 aa, Homo sapiens
LHSSSMPKLESLVLMIILSTGSPRFP

SEQ ID NO: 33203 - protein, 30 aa, Homo sapiens
LRASPDVNSFYLPRPRRIMLCAPSLPATEQ

SEQ ID NO: 33204 - protein, 72 aa, Homo sapiens
TTQKESTAKISACPVAELIRVMTGRYRAHHRNAPSMLVCCVLSFISSQLKLALLTWCTQSKNCKKTGAKPLP

SEQ ID NO: 33205 - protein, 12 aa, Homo sapiens
LLKEKIQLSDKG

SEQ ID NO: 33206 - protein, 494 aa, Homo sapiens
KLLNLSHSKSLSALQESQVERAKRKQKQAEQALQELRDLLTEGKQRQEEAVRTREAELRQAMDIPEEYWPSPEEPLRELMENLQRQLNLMKWTLCHRQNLPDRDVVRWASGGLALQGIYKASHQRGLTEKREELLSVPKEFLLLGPQQGTQMKTKEFTSPQAEFMFTQMVEKLGFRLTTSAKDGNWGFSLEAGLDHSKHPESKETQQSSSENSYFCSTKFSYIPLASCHFPIDQLQLSKPAVQELKCIEELLSQTTNPDRFSLLRHRIINFFHRFGSHVNQGPLHLGGIYWWKAISEGYCTEQLAEVRQQSAEALDIFIRDSYSGFGVKVAAGVNVSDSHSKTATQTKTSQNLQTKVQLSVAQTGGPPEADGLVQWKAGLIASNQTWCVIDRGLQLVPVWDIILSSHRSNFKDPLQVANFLKDSYTALTSITAQIQNGEELLSAGKEARVFLEDVKSWEVSDPEEQLKKLINFMKMLSQKLKSYDTWINICLTD

SEQ ID NO: 33207 - protein, 338 aa, Homo sapiens
VYEIEGCEVIWAIKDKAIGNTFFDAGAAEFLTSKLIAEKSEAKIAYKRTRYTTEGRKKEARSKSKSDNVGSALGPDWHEGLNLKGTKEFSHKIHLEAMCEVKKIYLQDEFRILKKKSFTFPRDHTSVTTNTEMWPVYVELTNEKIYGCDFIVSATGVTPNIEPFLHGNSFDLGEDGGLKVDDHMHTSLPDIYAAGDICTTSWQLSPVWQQMRLWTQARQMGWYAAKCMAAASSGDSIDMDFSFELFAHVTKFFNYKVVLLGKYNAQGLGSDHELMLRCTKGQEYIKVVMQNGRMMGAFLIGETDLEETFENLILNQMNLSSYGEDLLDPNIDIEDYFD

SEQ ID NO: 33208 - protein, 31 aa, Homo sapiens
LRRETAAGRDHPSRSSCPLFPETMRPFAMGA

SEQ ID NO: 33209 - protein, 70 aa, Homo sapiens
RLGMVFAPPRPGQRQAGAPWVPERRKRRPDGDTFLLSFLSTTWLKTWRSQQYKESKSRSCAREQMNSSSC

SEQ ID NO: 33210 - protein, 202 aa, Homo sapiens
TFGIRSAWISGLAEGVEVSKKCWHQGLSAGTLCPQFRGGIARGRVRVFMVAVGFMIAHFSVFRRFPISRGPSCALWFPAVTRAFSTQRMEGIYTHTHPSPSPQLWNKHSKSSILVGEMGNSYLSLTFILQTTYSFSRHGTHLVLFGFFFGFVVVVSVWAWFCLFLETRSRSVAQGWSAVARSWLTEASTSRAQAILLPQPPG

SEQ ID NO: 33211 - protein, 11 aa, Homo sapiens
MHSTKSVWPRI

SEQ ID NO: 33212 - protein, 34 aa, Homo sapiens
VFLSKCRIWEMTCLILFYNSFVCCCVFRTVPGTQ

SEQ ID NO: 33213 - protein, 13 aa, Homo sapiens
MIAVGFSQWALLC

SEQ ID NO: 33214 - protein, 17 aa, Homo sapiens
LIEYLHNALEHDMRLSV

SEQ ID NO: 33215 - protein, 15 aa, Homo sapiens
MMWCGLFGLSFFLRF

SEQ ID NO: 33216 - protein, 65 aa, Homo sapiens
RFWFHWKELKFMPRTENKKSYLFLKKKKKVFASSVLVFCTSVNLLALPSKSTAFFTFFYDQGKDH

SEQ ID NO: 33217 - protein, 5 aa, Homo sapiens
VIKMA

SEQ ID NO: 33218 - protein, 9 aa, Homo sapiens
LLNDDMNVL

SEQ ID NO: 33219 - protein, 32 aa, Homo sapiens
KTWPLQSVLSTASSLRPLVMMRPFFVWHLQRR

SEQ ID NO: 33220 - protein, 58 aa, Homo sapiens
KPAMVQSASVSKAGKGSSSSHGVAAALNQDLDPDPKCHVFNVSSQRCQMGSAQPCLCC

SEQ ID NO: 33221 - skipped

SEQ ID NO: 33222 - protein, 44 aa, Homo sapiens
LSRSCRRPERSRRRAPTTCSPRWPCSSIPLFFVHHTSHQTRISF

SEQ ID NO: 33223 - protein, 152 aa, Homo sapiens
IKHQRTHTGEKPYKCQECGKAFSHCSSLTKHQRVHTGEKPYECSECGKTFSQSTHLVQHQRIHTGEKPYECSECGKTFSQSSNFAKHQRIHIGKKPYKCSECGKAFIHSSALIQHQRTHTGEKPFRCNECGKSFKCSSSLIRHQRVHTEEQP

SEQ ID NO: 33224 - protein, 423 aa, Homo sapiens
INSQREEIERQRKMLAKRKPPAMGQAPPATNEQKQWKSKTNGAENETLTLKEYHEQEEIFKLRLGHLKKEEAEIQAELERLERVRKLHIREVKRIHNEDNSQFKYHPTLNDRYLLLHLLGRGGFSEVYKAFDLTEQRYVAVKIHQLNKNWRDEKKENYHKHACREYRIHKELDHPRIVKLYDYFSLDTDSFCTVLEYCEGNDLDFYLKQHKLMSEKEARSIIMQIVNALKYLNEIKPPIIHYDLKPGNILLENGTGCGEIKITDFGLSKIMDDDSYNSVDGMELTSQGAGTYWYLPPECFVVGKEPPKISNKVDVWSVGVIFYQCLYGRKPFGHNQSQQDILQENTILKATEVQFPPKPVVTPEAKALIRRCLAYRKEDRIDVQQLACDPYLLPHIQKSVSTSSPAGAAIASTSGASNNSSSN

SEQ ID NO: 33225 - protein, 45 aa, Homo sapiens
MGIGVSISLCGVSQGGQWGWGWDAVCAQRGQPGLIWPRGFWMFLG

SEQ ID NO: 33226 - protein, 45 aa, Homo sapiens
IQQLFGKCICCSEFNQKRIPASVPGSFIVPSPLSLSWGGVKRSRG

SEQ ID NO: 33227 - protein, 55 aa, Homo sapiens
IYFHILKFFSSALEVPSRFPGSSVPLPQTHGHNQPRSSWSESRECGGVGGVSGKA

SEQ ID NO: 33228 - protein, 54 aa, Homo sapiens
ISAPVSMSLSLCAPRIFRAPTPVPRGPRLGAGPPTSAETQSVERSPPSPHPQPL

SEQ ID NO: 33229 - protein, 482 aa, Homo sapiens
LERHEIHDIQDFYFREMQQNIHDFECQCHNDERNYREIPAIKIKNITGRRDQGDGRNAGNKPVENQLELSFWLHLAELQGFQIERKIYECNQIEKSVTRGSSVSLLQTNLPCVNTSISNIYRNDFMHPSLLTQDQKAYIREKPYKCSDCGKAFNQRSNLTTHQRIHTGQKPHKCDICGKGFRRIANLASHHRIHTGEKPYRCNECGKTFNQTFNLTTHQRIHTGQKPYKCDRCGKGFRQIGNLASHHRIHTGEKPYRCNECGKTFNRMFHLTRHQRIHTGQKPYKCDICGKGFRQIANLASHHRIHTGEKPYKCSDCGKTFNYRSHLTRHQRIHTGQKPYKCDTCGKDFSQNSYLENHQRIHTREKSYRCNECGKTFNKMTNLTTHQRIHTGQKTYKCDICGKGFRQIGNLASHHRIHTGEKPYRCNECGKTFNRMFHLTRHQRIHTGQKPYKCDICGKSFSQNSYLENHQRIHTGEKTYKL

SEQ ID NO: 33230 - protein, 9 aa, Homo sapiens
IKSFEVTVA

SEQ ID NO: 33231 - protein, 68 aa, Homo sapiens
KCESSVLGYSATCLPDMGRWRVSSVESWPFASTGGKLAIATAGTGTQAAPRPFLIRPPDSWALALALM

SEQ ID NO: 33232 - protein, 47 aa, Homo sapiens
LSRRPLPSHRPTQDPGLVTGQCDASRLPRGQRGTHRAWAAPEATRPG

SEQ ID NO: 33233 - protein, 165 aa, Homo sapiens
LGRAGGHTAWLSCSWSPASPRRPGGSISQEARSPPGGWAQPRQMDEKTKKAPENKPCANWLLLYWLSAEEMALSLTRAVAGGDEQVAMKCAIWLAEQRVPLSVQLKPEVSPTQDIRFLMVQNGHSSSIQPSHHRRKGRKTPLHTLLKSIAQKLYTLLPLIPVDQN

SEQ ID NO: 33234 - protein, 22 aa, Homo sapiens
IQMASFDLLTFYRLGATCTSVC

SEQ ID NO: 33235 - protein, 48 aa, Homo sapiens
IHLFDTYSWGHEFNSQKRIMMVGGGRMWRGAVQEPRGLVSWTLLIEFL

SEQ ID NO: 33236 - protein, 107 aa, Homo sapiens
KIVLNGVTVDFPFQPYKCQQEYMTKVLECLQQKVNGILESPTGTGKTLCLLCTTLAWREHLRDGISARKIAERAQGELFPDRALSSWGNAAAAAGDPIDSWLSAGPS

SEQ ID NO: 33237 - protein, 22 aa, Homo sapiens
KSGSFKNISYHLLPPHPLQARG

SEQ ID NO: 33238 - protein, 15 aa, Homo sapiens
MNHYVCAFCFTYLCI

SEQ ID NO: 33239 - protein, 14 aa, Homo sapiens
ICVYSVHKGQTSPN

SEQ ID NO: 33240 - protein, 20 aa, Homo sapiens
LCAQWPQVTCLQEEAELRCL

SEQ ID NO: 33241 - protein, 90 aa, Homo sapiens
MDSEMTPTIEGCVKDVSYQGGKSIKLSSETESSFSLSADISKADVSSSPTPSSDLPSHDMLRNYPSALSSSAGNIMPTTYISVTPKNWHG

SEQ ID NO: 33242 - protein, 13 aa, Homo sapiens
RFNSMAPNDEISF

SEQ ID NO: 33243 - protein, 45 aa, Homo sapiens
MWFQTRSCGHHDPVGITGVTKRAASSWDRGDRREFPGSSGRSQPH

SEQ ID NO: 33244 - protein, 176 aa, Homo sapiens
RSKFFHPKPVPGFQVAYVVFQKPSGVSAALALKGPLLVSTESHPVKSGIHKWISDYADSVPDPEALRVEVDTFMEAYDQKIAEEEAKAKEEEGVPDEEGWVKVTRRGRRPVLPRTEAASLRVLERERRKRSQKELLNYAWQHRESKMEHLAQLRKKFEEDKQRIELLRAQRKFRPY

SEQ ID NO: 33245 - protein, 49 aa, Homo sapiens
LSPFLYNPEEHFYQLFCKCKFFSSSRNIFKKEGITPYPIFKCKCFFFKS

SEQ ID NO: 33246 - protein, 169 aa, Homo sapiens
KNGKVVAVYGTLSDLLSVASSKLGIKATSVYNGKGGLIDDIALIRDDDVLFVCEGESFIDPQTDSKPPEGLLGFHTDWLTLNVGGRYFTTTRSTLVNKEPDSMLAHMFKDKSVWGNKQYHRGAFLIDRSPEYFEPILNSLRHGQLIVNDGINLLGVLEEARFFGIVSLI

SEQ ID NO: 33247 - protein, 10 aa, Homo sapiens
LEYFEAIFNI

SEQ ID NO: 33248 - protein, 130 aa, Homo sapiens
IFFSLAHRGIGYLLIPFPSEPPTLWPIGVTDICFLKIFFFWPIGASDTCFFFFYFSLPIGASDTCFNFCFSGPSGPRIPALIFFFHRPSVLFMDEKMLVLWVVALSGISTLFFAADHLVVCECTYRFGRE

SEQ ID NO: 33249 - protein, 4 aa, Homo sapiens
LQLS

SEQ ID NO: 33250 - protein, 13 aa, Homo sapiens
VTMQQKKEGPLSD

SEQ ID NO: 33251 - protein, 50 aa, Homo sapiens
ILVLTLGFWLLQLNMVPIDTDIRVGKDFVHRPKTLKGKSFHFGKGDIDFV

SEQ ID NO: 33252 - protein, 55 aa, Homo sapiens
MTQGVTENKKIQYQDNQTTTGLQFIETRAVLTLRSVEEMSIGEMAGSYSFFPPPP

SEQ ID NO: 33253 - protein, 57 aa, Homo sapiens
MKCGPVAPHCRFSSFLPPFRKCFKSVYSELKRQDEVDTACEDNSFKKFGCQGKQRMC

SEQ ID NO: 33254 - protein, 36 aa, Homo sapiens
MKCGPVAPHCRFSSFLPPFRKSTKKALKALNLFTVN

SEQ ID NO: 33255 - protein, 26 aa, Homo sapiens
MKPQELEADKLPGRRMRRQETNCLES

SEQ ID NO: 33256 - protein, 81 aa, Homo sapiens [sequence omitted]

SEQ ID NO: 33257 - protein, 14 aa, Homo sapiens
IWVIFIFIFLGLQA

SEQ ID NO: 33258 - protein, 12 aa, Homo sapiens
VIMLSDSPALAS

SEQ ID NO: 33259 - protein, 22 aa, Homo sapiens
ISNVFVIYLTNCLICYVNVFMN

SEQ ID NO: 33260 - protein, 58 aa, Homo sapiens
KRVLYPSAVLLHLRPEPRSAQDWNAFPSGLSWSLGLGAALLRYNSCACGFGWHNLCLG

SEQ ID NO: 33261 - protein, 50 aa, Homo sapiens
TFLSFLVKHSLMTMMDIYTYIHIIHNDICVRIYLRLYFVGWAKFSVTITS

SEQ ID NO: 33262 - protein, 68 aa, Homo sapiens
LPFSSGTTLHKCVPRGSPFLSSSTENAARSSYPSSRGPAAMLYAPEGTLVPRKERKKRDGLWLHFLGP

SEQ ID NO: 33263 - protein, 22 aa, Homo sapiens
VITGSGLPLKGILMLTTSPRRA

SEQ ID NO: 33264 - protein, 27 aa, Homo sapiens
VDQQRLQSPASFPTLMNCILKRTLSDW

SEQ ID NO: 33265 - protein, 107 aa, Homo sapiens
IKQLFCRLDYKDTIAVARFIVFLASSSTSRDGKPCIFLKAFEDLKSTVYVYVKSLRDFSTESMSLVPATNYIYTPLNQLKGGTIVNVYGVVKFFKPPYLSKGTDSSI

SEQ ID NO: 33266 - protein, 4 aa, Homo sapiens
IKMA

SEQ ID NO: 33267 - protein, 45 aa, Homo sapiens
VLSTASSLRPLVMMIKGGGCGLENSHVKTHHLKVLSVRIFMMKFL

SEQ ID NO: 33268 - protein, 5 aa, Homo sapiens
LCKAV

SEQ ID NO: 33269 - protein, 4 aa, Homo sapiens
LQTS

SEQ ID NO: 33270 - protein, 101 aa, Homo sapiens
TDICFLKIFFFWPIGASDTCFFFFYFSLPIGASDTCFNFCFSGPSGPRIPALIFFFHRPSVLFMDEKMLVLWVVALSGISTLFFAADHLVVCECTYRFGRE

SEQ ID NO: 33271 - protein, 7 aa, Homo sapiens
MNLGLVA

SEQ ID NO: 33272 - protein, 1775 aa, Homo sapiens
MEVKVKSESPETVEEAQRKSTYEVSLALSCFLNYLQKTEQTDTQLLLLSIAAAAGYHVINNTFQSLLGCDELSFLLDEMQTAQNKYQELKNICSYRAQAFLVLTGLTATVGDTAISSEEKTQRMSLMRHHMGQSLSKEVAHVLTKPGADHDWENLEKDLRLLINGDYEEVTISSLQMEEVSKQSLFYGKKQPHEPHDNENNKWEMIKNGAFLDLLQHLGLEHYYPKKLSKANFHLIYKTSVYNTQPSSEQELPFYFLQKLLMMDYELRYLVFKDDRNTEHQVHPNASDQEDEAFDPYENFFEDSDSPTKSSSTEPSPHIHPVDIQMTIFHCADNFARQYILAKLSTCQFALPLLVPNPCTSQIEFSLWSLRQITRSWQEARKSPKGKNYYKNQQMCCVSTSIVSFVRVGNGLSASKSQIMNCLLSKRKHDVFFHRHCTGSRKDCLLMGGMVEICWFCPGGEDEDRFDNCVTFTNLHGDAKEHEQQLSFLKEVSTVIVVLMSASDDNEGNRKIVRNLWQSSRPLICLLDDKEATMTNISGQRMRMGIKNRNEAELTEELTTTIRHLLELSDTALSLEDCSQIAHQQGFLIDEDQRDCKEAKEKAQALMAFLGKMKLSQIKEKLLPLQGQLWHHWCKKDKELYHLREKGNQSIEQHKSEIETDKQIIRHEQLARALPLNDLMQSVLQFLQEHSEIHTKLYFLQWLSVFLDKLTAGHLEELHEKQKYWWSLVQTVKQKAPNSHSLICLQSEIEAISTEISDCTLGIEQLIREVGQIYEALEEASSIKKIFFSLPQIAADLMISGVPIELMDGDAAYVPLTWVAAVFDKVSEKLGDKRLFVLSILGLQSSGKSTVLNALFGLQFTVSAGKCTQGAYMQLLKVEETFTEELGFDFVLAVDTEGLRAPEHSNKSKDRDNELVTFVIGLANLTLINIFGENPSEMQDILQIVVQAFLRMKQVKIFPSCLFVHQNVGEATATDQTMDGRRRLEQKLDEMAAIAAEQEQCLDVTCFSDVIRFDVNTHVYYFAHLWDGNPPMAPPNPRYSHNVQQLKSRILMTATQESRGNIMKISDVKSRVQDLWRGLMNENFIFSFRNTQEVMAMNKLETMYNHWTWELRSHVLGLQNQLINQIQNGKIQTLEASTFEVLVTEKYEVVKQELEKYFNEGPCSKILIQCKANFENKLIVLKEKLISDSKRQANELISFKNQSQERLNKKKTDYEKELLEKSRKLALTVKGKELSEEELHEKFNQLWKKWVCDVSTTLPQVTEPDIDLDSENILWEYFKNKTNVVGLLTNSAEKFQINYDKHIKVNKKYNHIPMTLTVFEKEFINMTTDYIVSRFNKIINNMWKQQCGYNPNYFHEILKTIEEEVKSASTQKRYTFTNTFIIDLCVCLFQRARENFKEMHRAFKRANDPVNYLESKKDDFFTSFKISCQGATSIKTFVDVLWYKLTPAVSTTIWEDMTFKIAGDMRATCPAFNGNRTNLEKHILFSLAEEENFDNYWEYLHNSKSFFRSYIKNHIKRYCSDNGGEKMKTFFEKSLIDIKNTILSAIHESTSVAKDKSSTASEWLDLFCDCLGCNLIFPRRDLISIEHQEIKHTEFLKEAMSAALDLTMKKIEQNYSSKPIEAMVSKIEKMLSEHLCGCWKQCPSCGAICTNTIPTHEGDHSVPFHRPQAVNGEEWYETDDFVIDCCTSLVASDCLLVLRDGRNFPFKNYRQAGGDYAMWSITPDTSIQLYWKWFVSHFRSNLEEKYQKKFAGKGKIPNAWAKITKQDVLEDLKKQ

SEQ ID NO: 33273 - protein, 52 aa, Homo sapiens
MCLSGGGKTTLIGAEGTMALSSVAQWSSSEDAKIHEKTSRTSGRIFNGKSLG

SEQ ID NO: 33274 - protein, 91 aa, Homo sapiens
KSTHRNPEDARAGKYEGKHKRKKRRKQNQNQHRSRHRSVTSFSSDDPMFPSSSSSSSGSQTDSSIEDAAKGKIKKKRREKTNKWEKRKDKI

SEQ ID NO: 33275 - protein, 21 aa, Homo sapiens
MQSVHMRRDFPLSPSSVISLP

SEQ ID NO: 33276 - protein, 22 aa, Homo sapiens
LSIFNPVSKNFFTTITFRFLPL

SEQ ID NO: 33277 - protein, 33 aa, Homo sapiens
LNIWSSLNSLYIGNLPASIHIPTSVCIPRITGR

SEQ ID NO: 33278 - protein, 76 aa, Homo sapiens
RRRQVARSRAGAGPGHGRLGAAVRVVAALLRAEGPGLPAAVAEGLCRCLQEEHLTVLSGATKARGGRCRGPAATTG

SEQ ID NO: 33279 - protein, 14 aa, Homo sapiens
LLPTPLLCPFLPLI

SEQ ID NO: 33280 - protein, 56 aa, Homo sapiens
LCVFASVCLTDGPHTRFPVTGRDPGKRGLEGGRGAAIQLPARIFGPALSSSPGVGS

SEQ ID NO: 33281 - protein, 50 aa, Homo sapiens
LGLSGWISPPLLLPRRSTEGAAKRAVSANPASLCGGLCHRAMGPEVPGPG

SEQ ID NO: 33282 - protein, 460 aa, Homo sapiens
KEKTHINIVVIGHVDSGKSTTTGHLIYKCGGIDKRTIEKFEKEAAEMGKGSFKYAWVLDKLKAERERGITIDISLWKFETSKYYVTIIDAPGHRDFIKNMITGTSQADCAVLIVAAGVGEFEAGISKNGQTREHALLAYTLGVKQLIVGVNKMDSTEPPYSQKRYEEIVKEVSTYIKKIGYNPDTVAFVPISGWNGDNMLEPSANMPWFKGWKVTRKDGNASGTTLLEALDCILPPTRPTDKPLRLPLQDVYKIGGIGTVPVGRVETGVLKPGMVVTFAPVNVTTEVKSVEMHHEALSEALPGDNVGFKVKNVSVKDVRRGNVAGDSKNDPPMEAAGFTAQVIILNHPGQISAGYAPVLDCHMAHIACKFAELKEKIDRRSGKKLEDGPKFLKSGDAAIVDMVPGKPMCVESFSDYPPLGRFAVRDMRQTVAVGVIKAVDKKAAGAGKVTKSAQKAQKAK

SEQ ID NO: 33283 - protein, 53 aa, Homo sapiens
LVERALPALRGFQPGSFGKPGRLLTGDDTCVGCWHSCYLTREGGDFACDGLPV

SEQ ID NO: 33284 - protein, 75 aa, Homo sapiens
KSPDTVCLSRGKLLVEKAIKDHDFIPSYSILSNALSWGVKILHIDDIRYYIEQKKKVAFTQEIKYFSKRWGQKSW

SEQ ID NO: 33285 - protein, 6 aa, Homo sapiens
ITSLAV

SEQ ID NO: 33286 - protein, 42 aa, Homo sapiens
VRELRGPGIVFKVVLLPTCPVVPAPVLTATLPFFHPRVGSTK

SEQ ID NO: 33287 - skipped

SEQ ID NO: 33288 - protein, 28 aa, Homo sapiens
LQSLQFIMELLYWLLEGGDSEDKEVKPV

SEQ ID NO: 33289 - protein, 47 aa, Homo sapiens
RARAPPGALPRRCPPRDPLPTSHHVGPRGQRAAGWDHFGLRSLEKIF

SEQ ID NO: 33290 - protein, 20 aa, Homo sapiens
KVILPLFLCPLGMVETSLML

SEQ ID NO: 33291 - protein, 20 aa, Homo sapiens
MGGNLKKSTADASGSRGHQL

SEQ ID NO: 33292 - protein, 200 aa, Homo sapiens [sequence omitted]

SEQ ID NO: 33293 - protein, 61 aa, Homo sapiens
IFFLLYHPEQQDQYILYFLLFSLLVKTRMKTSMMSHLHLMTVSHWPATCSSLCLPDYNNSM

SEQ ID NO: 33294 - protein, 12 aa, Homo sapiens
KDLKFLPLFFMS

SEQ ID NO: 33295 - protein, 31 aa, Homo sapiens
RIWFATERNLDADHFTSESMNCSHAFKSFSG

SEQ ID NO: 33296 - protein, 6 aa, Homo sapiens
ICSPPM

SEQ ID NO: 33297 - protein, 39 aa, Homo sapiens
KFQIDIPDKRCLSPCLSSDLHSTVPGKVEPPASPCPSRC

SEQ ID NO: 33298 - protein, 26 aa, Homo sapiens
MVFLREKITEETSALMALQSWQYYNP

SEQ ID NO: 33299 - protein, 100 aa, Homo sapiens
LDYKDTIAVARFIVFLASSSTSRDGKPCIFLKAFEDLKSTVYVYVKSLRDFSTESMSLVPATNYIYTPLNQLKGGTIVNVYGVVKFFKPPYLSKGTDSSI

SEQ ID NO: 33300 - protein, 52 aa, Homo sapiens
KETRSRGTTVGQAAWKISAGSPRQNSHAPGQAVPTAWWRGNLTSGRAPLLHS

SEQ ID NO: 33301 - protein, 396 aa, Homo sapiens
IYECNQIEKSVTRGSSVSLLQTNLPCVNTSISNIYRNDFMHPSLLTQDQKAYIREKPYKCSDCGKAFNQRSNLTTHQRIHTGQKPHKCDICGKGFRRIANLASHHRIHTGEKPYRCNECGKTFNQTFNLTTHQRIHTGQKPYKCDRCGKGFRQIGNLASHHRIHTGEKPYRCNECGKTFNRMFHLTRHQRIHTGQKPYKCDICGKGFRQIANLASHHRIHTGEKPYKCSDCGKTFNYRSHLTRHQRIHTGQKPYKCDTCGKDFSQNSYLENHQRIHTREKSYRCNECGKTFNKMTNLTTHQRIHTGQKTYKCDICGKGFRQIGNLASHHRIHTGEKPYRCNECGKTFNRMFHLTRHQRIHTGQKPYKCDICGKSFSQNSYLENHQRIHTGEKTYKL

SEQ ID NO: 33302 - protein, 25 aa, Homo sapiens
KRAASSWDRGDRREFPGSSGRSQPH

SEQ ID NO: 33303 - protein, 12 aa, Homo sapiens
MFSLMSPQNSGW

SEQ ID NO: 33304 - protein, 125 aa, Homo sapiens
MEPDFLHSVGVKLPHTPPNTCPRASPSHPPSQGRRDPVPVEVGKPSRVQKAEAMAQSGGAAFWGSALGLQTQGAEMLAAGPPTRARQPALPGELRGAEVPGEAAPGARALPDLGNRQSGAPGSKS

SEQ ID NO: 33305 - protein, 21 aa, Homo sapiens
MPKLESLVLMIILSTGSPRFP

SEQ ID NO: 33306 - protein, 112 aa, Homo sapiens
MWKGGRSHPFLPCSSRRAGSGGQLDSILPHQSPAWGPWGCKDLSSGVPSFLTSSILWKSAVFAEDNGLKIHLCSYKRDDLVLFYDCTSFVLTFGPSPWFLTQGFLNPLEFSA

SEQ ID NO: 33307 - protein, 35 aa, Homo sapiens
MKLIFFTVLILMIPSIKKTDRSIVCCLRKGESGQS

SEQ ID NO: 33308 - protein, 75 aa, Homo sapiens [sequence omitted]

SEQ ID NO: 33309 - protein, 120 aa, Homo sapiens
MKTKRMNYIDLFNLRKKRFWTREGRFSFLRALSFGGFFVWAPLPFFTFSSYWETTLPWPVPPCSSQSHPDASLASSPSVPVSGIGGFLVSLTSTMKPRTLAKRQRMLTQTYRLGLQGSAR

SEQ ID NO: 33310 - protein, 70 aa, Homo sapiens
KKRRKQNQNQHRSRHRSVTSFSSDDPMFPSSSSSSSGSQTDSSIEDAAKGKIKKKRREKTNKWEKRKDKI

SEQ ID NO: 33311 - protein, 25 aa, Homo sapiens
IPCARDSILYGSLGSVVAGFGLFFC

SEQ ID NO: 33312 - protein, 30 aa, Homo sapiens
KTSTYCMLTRRKDNIFRKSTAHCCLYTLYI

SEQ ID NO: 33313 - protein, 6 aa, Homo sapiens
VYLLSK

SEQ ID NO: 33314 - protein, 147 aa, Homo sapiens
ITRWEQPERSRASAPMLLRMSEHRNEALGNYLEMRLKSSFLRGLGSWKSNPLRLGGWTILLTLTMGQGEPGGPQGDPWVPHELLLPSLCDSSHASSWGSGSITCAWRGGDSSSHPLVSGHILSNSPVAAVMCSSMGTHLSPFKGTLL

SEQ ID NO: 33315 - protein, 17 aa, Homo sapiens
RRPTRRRLCCSHVSSDP

SEQ ID NO: 33316 - protein, 693 aa, Homo sapiens
LFCRLDYKDTIAVARFIVFLASSSTSRDGKPCIFLKAFEDLKSTVYVYVKSLRDFSTESMSLVPATNYIYTPLNQLKGGTIVNVYGVVKFFKPPYLSKGTDYCSVVTIVDQTNVKLTCLLFSGNYEALPIIYKNGDIVRFHRLKIQVYKKETQGITSSGFASLTFEGTLGAPIIPRTSSKYFNFTTEDHKMVEALRVWASTHMSPSWTLLKLCDVQPMQYFDLTCQLLGKAEVDGASFLLKVWDGTRTPFPSWRVLIQDLVLEGDLSHIHRLQNLTIDILVYDNHVHVARSLKVGSFLRIYSLHTKLQSMNSENQTMLSLEFHLHGGTSYGRGIRVLPESNSDVDQLKKDLESANLTANQHSDVICQSEPDDSFPSSGSVSLYEVERCQQLSATILTDHQYLERTPLCAILKQKAPQQYRIRAKLRSYKPRRLFQSVKLHCPKCHLLQEVPHEGDLDIIFQDGATKTPDVKLQNTSLYDSKIWTTKNQKGRKVAVHFVKNNGILPLSNECLLLIEGGTLSEICKLSNKFNSVIPVRSGHEDLELLDLSAPFLIQGTIHHYGCKQCSSLRSIQNLNSLVDKTSWIPSSVAEALGIVPLQYVFVMTFTLDDGTGVLEAYLMDSDKFFQIPASEVLMDDDLQKSVDMIMDMFCPPGIKIDAYPWLECFIKSYNVTNGTDNQICYQIFDTTVAEDVI

SEQ ID NO: 33317 - protein, 26 aa, Homo sapiens
MFLAVMFKNTSASLPQVSDLSSNYVC

SEQ ID NO: 33318 - protein, 40 aa, Homo sapiens
LEGKLKTCSRKHEQKQMMKMSILLDVDNITINYGEKYIFG

SEQ ID NO: 33319 - protein, 14 aa, Homo sapiens
IDDLFLLPHPEFVL

SEQ ID NO: 33320 - protein, 10 aa, Homo sapiens
VGFSQWALLC

SEQ ID NO: 33321 - protein, 34 aa, Homo sapiens
IYIFNSSRMRKLINTKSFHVFSDERLAESKKRSP

SEQ ID NO: 33322 - protein, 24 aa, Homo sapiens
RALGGPSPPPPPEEEGGEMEARGG

SEQ ID NO: 33323 - protein, 55 aa, Homo sapiens
LEPGSQILDPELHLCQEPRGERMAVSVAMSKLCILQTLCFPKIGTQKRTDHFLQL

SEQ ID NO: 33324 - protein, 26 aa, Homo sapiens
LGAGPPTSAETQSVERSPPSPHPQPL

SEQ ID NO: 33325 - protein, 42 aa, Homo sapiens
LPSHRPTQDPGLVTGQCDASRLPRGQRGTHRAWAAPEATRPG

SEQ ID NO: 33326 - protein, 13 aa, Homo sapiens
LQRKSLRKSAWVK

SEQ ID NO: 33327 - protein, 58 aa, Homo sapiens
LQRKSLRKSAWVSALDPRTVQGSPKTMELVIWDLGLLIFLTVNLLVVFVGTRGAENGE

SEQ ID NO: 33328 - protein, 12 aa, Homo sapiens
LWPDPLEINPES

SEQ ID NO: 33329 - protein, 31 aa, Homo sapiens
MANKINFVNLPVKTKAQIHFGYKFTFRELRL

SEQ ID NO: 33330 - protein, 31 aa, Homo sapiens
MKLLHGVKNAKKRIEKIGKLEDKNILLEEKR

SEQ ID NO: 33331 - protein, 161 aa, Homo sapiens [sequence omitted]

SEQ ID NO: 33332 - protein, 196 aa, Homo sapiens
MITSAENWDVETLVAGPGRLRTEQVFWTTDTLPRRPPQAAPPQAHDSAPLVSAALPDWSSDGLRQPPQPTQIPADLGNSPPSLKVRGPPRFPERSRAAGTYLRPPASGKGRATARPPTTGTARTATGKLPLEKDDCPTKTCIHSYILPWKSTVELDPSTDSTGIVNILVTLKFPSTDLQTSKNLLLRPAEMFERSN

SEQ ID NO: 33333 - protein, 26 aa, Homo sapiens
MRRPGTTSPGMHRRRVREFSPSQLDY

SEQ ID NO: 33334 - protein, 27 aa, Homo sapiens
MFTQVHECCDAGNLGKIHQNLRVIKMA

SEQ ID NO: 33335 - protein, 35 aa, Homo sapiens
MCLRKSLASCPCEDPPPPPQLLPCTLKHLRLCKAV

SEQ ID NO: 33336 - protein, 64 aa, Homo sapiens
MFLLANSGDSPARFAKRPTVLCVALGLHFPTAPARPGGCSMRCCACVAGGLAVRLTASGLRLGG

SEQ ID NO: 33337 - protein, 211 aa, Homo sapiens [sequence omitted]

SEQ ID NO: 33338 - protein, 36 aa, Homo sapiens
MEEGPSNLVEHVCCLGPGLSGCSAHRSFCLGQDTWL

SEQ ID NO: 33339 - protein, 349 aa, Homo sapiens
MAGDSSRTSLVSTIAGILSTVTTSSSGTNPSSSASTTALPVTQSVKKPSKPVKKNQACEMCGKAFRDVYHLSRHKLSHSDEKPFECPICNQRFKRKDRMTYRVRSHEGGITKPYTCSVCGKGFSRPDPLSCHVKHVHSTERPFKCQTCTAAFAAKDRLRTHMVRHEDKVSCNICGKLLSAAYITSHLKTHGQSQSINCNTCKQGISKTSMSEETSNQKQQQQQQQQQQHVTSWPGKQVATLRLWEEAVKARKKEAANLCQTSTAATTPVTLTTPFNITSSVSSGAMSNPVTLAAAMSMRSSVNVSRAVNITSPMNIGHPVTITSPLSMTSPLTLTTQINLPTPSLPQRI

SEQ ID NO: 33340 - protein, 108 aa, Homo sapiens
MWHQTATQTTVSSATLVTHIQARFHLQQSWMRWLAEANPLPALQAKAGMWPRWFLRSLTILRSCILSISGQRCLHAPSSFVSLMFLATCYSSLSYFSRFHRERFSCPW

SEQ ID NO: 33341 - protein, 105 aa, Homo sapiens [sequence omitted]

SEQ ID NO: 33342 - skipped

SEQ ID NO: 33343 - protein, 18 aa, Homo sapiens
MVILLGWAVDLIRFAFSC

SEQ ID NO: 33344 - protein, 16 aa, Homo sapiens
MAAWDSYCRGERLKSS

SEQ ID NO: 33345 - protein, 15 aa, Homo sapiens
KLEVEMVESNLPGPA

SEQ ID NO: 33346 - protein, 20 aa, Homo sapiens
IFNPVSKNFFTTITFRFLPL

SEQ ID NO: 33347 - protein, 147 aa, Homo sapiens
VGTDQFGNKYYYILQNKNWRGQTIQEKRIVEAANKKEVDYETGDIPTEWEAWIRRTRKTPPTMEEILKNEKHREEIKIKSQDFYEKEKLLSKETSEELLPPPVQTQIKGRASAPYFGKEKPSVAPSSTGKTFQPGSWMPRDGKSHNE

SEQ ID NO: 33348 - protein, 1116 aa, Homo sapiens
KREKFLTEISFRGCGGEEEGKKRAGRPLLPPSLLSLSFSPFLTRPPTPPAAGDAARESAGPGSVSSAAAAAAAALRLGIPKRRTPFLSFSRSARLSAFVPRGRPARRLRPSPCVRPSRPASLGLRLSTRAFLRTRGPARPLRPQRLPFPSPPLLPPPSPTLPTPFSCPEARCACACVCPSANAATSARQMNSVRAANRRPRRVSRPRPVQQQQQQPPQQPPPQPPQQQPPQQQPPPPPQQQQQQQPPPPPPPPPPLPQERNNVGERDDDVPADMVAEESGPGAQNSPYQLRRKTLLPKRTACPTKNSMEGASTSTTENFGHRAKRARVSGKSQDLSAAPAEQYLQEKLPDEVVLKIFSYLLEQDLCRAACVCKRFSELANDPILWKRLYMEVFEYTRPMMHPEPGKFYQINPEEYEHPNPWKESFQQLYKGAHVKPGFAEHFYSNPARYKGRENMLYYDTIEDALGGVQEAHFDGLIFVHSGIYTDEWIYIESPITMIGAAPGKVADKVIIENTRDSTFVFMEGSEDAYVGYMTIRFNPDDKSAQHHNAHHCLEITVNCSPIIDHCIIRSTCTVGSAVCVSGQGACPTIKHCNISDCENVGLYITDHAQGIYEDNEISNNALAGIWVKNHGNPIIRRNHIHHGRDVGVFTFDHGMGYFESCNIHRNRIAGFEVKAYANPTVVRCEIHHGQTGGIYVHEKGRGQFIENKIYANNFAGVWITSNSDPTIRGNSIFNGNQGGVYIFGDGRGLIEGNDIYGNALAGIQIRTNSCPIVRHNKIHDGQHGGIYVHEKGQGVIEENEVYSNTLAGVWVTTGSTPVLRRNRIHSGKQVGVYFYDNGHGVLEDNDIYNHMYSGVQIRTGSNPKIRRNKIWGGQNGGILVYNSGLGCIEDNEIFDNAMAGVWIKTDSNPTLRRNKIHDGRDGGICIFNGGRGLLEENDIFRNAQAGVLISTNSHPILRKNRIFDGFAAGIEITNHATATLEGNQIFNNRFGGLFLASGVNVTMKDNKIMNNQDAIEKAVSRGQCLYKISSYTSYPMHDFYRCHTCNTTDRNAICVNCIKKCHQGHDVEFIRHDRFFCDCGAGTLSNPCTLAGEPTHDTDTLYDSAPPIESNTLQHN

SEQ ID NO: 33349 - protein, 42 aa, Homo sapiens
KSAVGGEGPGHTPSPPDSSPSGSAQPWTLDLDKKREAALWWI

SEQ ID NO: 33350 - protein, 78 aa, Homo sapiens
IVLRETSKHLEHKDNELRQKKKELLERKTKKKPEQKISSKLGSLKLMEQDTCNLEEEERKASSKIKEINVQKAKLVTE

SEQ ID NO: 33351 - protein, 56 aa, Homo sapiens
ILLRNKNLINPSSLLELFFELLCCHDKLLQKTSYTYIVTDIKNINAKHKNKVDVVL

SEQ ID NO: 33352 - protein, 33 aa, Homo sapiens
TATAAPDLGDHVLPLQKELPFVTRRGRRSTLGP

SEQ ID NO: 33353 - protein, 29 aa, Homo sapiens
IYIYIYIPICIFFTDSDVCSEIVNHESST

SEQ ID NO: 33354 - protein, 21 aa, Homo sapiens
TNVTLRGISSFMKPFRILNCI

SEQ ID NO: 33355 - protein, 6 aa, Homo sapiens
VLADTD

SEQ ID NO: 33356 - protein, 10 aa, Homo sapiens
LCWLLMKIIK

SEQ ID NO: 33357 - protein, 38 aa, Homo sapiens
LFTSAVSSFSCKKSLECTKLCLPQIENVKGTEDSGEEK

SEQ ID NO: 33358 - protein, 63 aa, Homo sapiens
KWTQHVKTILSRSLAVKENRECAKEHTDTEQTGHLCNHMEVCLILKLKKLSWKTERPSPDDIV

SEQ ID NO: 33359 - protein, 35 aa, Homo sapiens
LKCGYHFSTHYLHDLEWKRPLFFLFCLSNSTQRSS

SEQ ID NO: 33360 - protein, 187 aa, Homo sapiens
IANLASHHRIHTGEKPYKCSDCGKTFNYRSHLTRHQRIHTGQKPYKCDTCGKDFSQNSYLENHQRIHTREKSYRCNECGKTFNKMTNLTTHQRIHTGQKTYKCDICGKGFRQIGNLASHHRIHTGEKPYRCNECGKTFNRMFHLTRHQRIHTGQKPYKCDICGKSFSQNSYLENHQRIHTGEKTYKL

SEQ ID NO: 33361 - protein, 44 aa, Homo sapiens
VESWPFASTGGKLAIATAGTGTQAAPRPFLIRPPDSWALALALM

SEQ ID NO: 33362 - protein, 31 aa, Homo sapiens
RIMMVGGGRMWRGAVQEPRGLVSWTLLIEFL

SEQ ID NO: 33363 - protein, 147 aa, Homo sapiens
LQPSSTMGQVGRQLAIIGDDINRRYDSEFQTMLQHLQPTAENAYEYFTKIASSLFESGINWGRVVALLGFSYRLALHIYQRGLTGFLGQVTRFVVDFMLHHCIARWIAQRGGWVAALNLGNGPILNVLVVLGVVLLGQFVVRRFFKS

SEQ ID NO: 33364 - protein, 48 aa, Homo sapiens
MLVSAFGLCRLSSCRAPRGVRTRRSARWALSSPAAFEVSAALGLCGGE

SEQ ID NO: 33365 - protein, 98 aa, Homo sapiens
MRRWQTSYYLGAPAASAGSHGSPWQPSRSAWQRSKPAAQPPCRRAERGCPRRRLPGPSWTCRPPKSCQISMAIHPKSSSESPWRTWTPSIAPKRLSSY

SEQ ID NO: 33366 - protein, 100 aa, Homo sapiens
MNVKGKVILSMLVVSTVIIVFWEFINSTEGSFLWIYHSKNPEVDDSSAQKGWWFLSWFNNGIHNYQQGEEDIDKEKGREETKGRKMTQQSFGYGTGLIQT

SEQ ID NO: 33367 - protein, 61 aa, Homo sapiens
MPQARRSSGSLSPAVGSVSTPIPSPEPKFGGNVSSGQDTPGQPHPPHHRLQTGAAATELKP

SEQ ID NO: 33368 - protein, 80 aa, Homo sapiens
MQWPEVPALPLLSSLCMAMVRKSSALGKEVGRRVKEMVMLVAPFRQSSSLSRTFSSRKVVKAHASLHGARLSPLSRNIRG

SEQ ID NO: 33369 - protein, 36 aa, Homo sapiens [sequence omitted]

SEQ ID NO: 33370 - protein, 54 aa, Homo sapiens
MRVMVTSCDCRESLGYHGGKRLDKLFEKQACELLWRNNSLSLIWSLSKEKQRGP

SEQ ID NO: 33371 - protein, 44 aa, Homo sapiens
MASLNIHFSVVYARNGVAGIKVAESSSTLVAETNDADLPQKLHF

SEQ ID NO: 33372 - protein, 30 aa, Homo sapiens
MDLCFYLEIMATSRTFSVHIQREKPQEEIP

SEQ ID NO: 33373 - protein, 27 aa, Homo sapiens
MTRSLLLPGICEQLPGSGQDPFLLLIG

SEQ ID NO: 33374 - protein, 134 aa, Homo sapiens
MGVFTMQGQGIPCCSTIRFGTPPPPRPHQRASAMPRRGPQQTRQDPPVGPKAGGRAAPPNSQDACSTPHAPLSASGEHPATPRHTHPGYIPPSHAWSGALEMSEIQAFPKESGLEGGLPPFAELHMTTADDRPH

SEQ ID NO: 33375 - protein, 19 aa, Homo sapiens
MLLCLCIWSLFGATVDRHL

SEQ ID NO: 33376 - protein, 32 aa, Homo sapiens
LRYFIFLAFLEITTSCGSVSGNFTDLSPPSHK

SEQ ID NO: 33377 - protein, 80 aa, Homo sapiens
MRESPTQVKLRSKTVYRVNLSVIMKKWQSSKKVVVMGRWRSTSPFVLWVTGCPPLLWGAHQQLRGEGQPCCTSTDIRSRQ

SEQ ID NO: 33378 - protein, 149 aa, Homo sapiens
MCCLCVLWVLGVTFSLGDGIQNSSAGAPLLHLLPGSYWASSSSSLYLYSTGSRESPADGFCPGLKQPESYGKGRAWLARGIFQVLKRQAYGACDPSRRTKWDLKIHSTSAHGGPGPAPARGHTADWAAGMPGLCWRPLWLAFTSVCLQE

SEQ ID NO: 33379 - protein, 46 aa, Homo sapiens
LRTVLAVAAAAPVSRWARTQPLGAVAFPASQRQKRGSGTQKVGLRL

SEQ ID NO: 33380 - protein, 174 aa, Homo sapiens
MTLSPLRAWPGRKPWSWRLLWAPLPSLGLPAPPRRMGPLSGPAVAFLALRAPTQPRLAPCLHPPHRLPPWAGPGHHSRGPQCHHHLQSASARRWGCCSSLGTPRPSRSPRRMTPTSGWPTSLGQMPTVAKWPGTTSPASSSVTSHCCSTSGQPQRAQGCCSPSRTRRRPWSCWA

SEQ ID NO: 33381 - protein, 102 aa, Homo sapiens
LGRTPLPLILAVAGSLPGTPLVSLGLPLHATSLSKSEDISTWTPDHVPALSSEAHQASLLWAAGPGPGLWTLGSWQAPSAVGSGPRPHHVEPRRWLPGCRRQ

SEQ ID NO: 33382 - protein, 41 aa, Homo sapiens
VSMWKKRSSFTYLFLFVSLPGHSLFQRLNSLCNGVWVHLSL

SEQ ID NO: 33383 - protein, 99 aa, Homo sapiens
LEKLLKMMMMIMMKKVKKRMRKGKKKEMRKMIQTMTQRRIKTQQSASSSEAGWSTFCFPGKDEFTSFDKPIFKLFVVCLLVFVFAAKIKISNTILVLTR

SEQ ID NO: 33384 - protein, 49 aa, Homo sapiens
MRKFTILKGSMLFSISLYLISDLKLLMQFMNLRKKNVNGNQMKKMRFRN

SEQ ID NO: 33385 - protein, 92 aa, Homo sapiens
LGLGMWYRLLAAAGSRAVARPLALLWRCGGPGGGRTAKTSARALGKARQKKLGKLIWPPVPVLPGDPRSEADSAGKTDVIFLVAVFKTTQRV

SEQ ID NO: 33386 - protein, 187 aa, Homo sapiens
LKREDTRKQVKIILLLFCIQQASYYGTAVMGQAYLPELGTQEVSPKVLQGPQQAWTEEVWTAWPCPEPLCIITAVPNLHPTLSLPIPGPGALLLCSRDSWSSLRQHTVLLWRRPSPTHAGMLQPVPEQVVAGGCWQRRDNGPAPGGKCWLQGTESSPCHSPCYPLGNLKGISKNSGSATLLSFLWNM

SEQ ID NO: 33387 - protein, 95 aa, Homo sapiens
VPGQRLLDRYGHTQPLCVIQAKPPSTYMSCSTTTLSRSSLCLAAALSPRWWLRLLGCGTSLCFPMAPAHQPCQTGSVSPLSSERTHQPHSTTLPA

SEQ ID NO: 33388 - protein, 76 aa, Homo sapiens
VRGQALRLDGGHWAGAWSPAGWAAAAAAAASQRGAQRPPRQVVSRPSASVATPARGQPTVPRAPGGGGTAQVQRGS

SEQ ID NO: 33389 - protein, 133 aa, Homo sapiens
LGLFVSAVLRLSSVSLGPSLPRRALAGRLVARGGGGLGAGRDERRLHELRERRAGGGARLQLPAAGGRGGRCLLLRLPRPQVLLRRPAQLLPLRAQLHVVAQHWRSHRPVRSSSGSSRLHCYRLCALLPVHQL

SEQ ID NO: 33390 - protein, 55 aa, Homo sapiens
LVLLWLPVLVRDLCPALQPSPHSLLIPLPPLLTSCSPWSRWFSRGAPAPLPRPQS

SEQ ID NO: 33391 - protein, 39 aa, Homo sapiens
LVCVAFSMGLCWMRVLLTQVYTSISGQQKRRMTQAWCIK

SEQ ID NO: 33392 - protein, 67 aa, Homo sapiens
MCHKGWHGPGVPHHVAFTPCKARLRPATQCQAHSSPRRKMVQAGSIPLAAASGRLCLTHAGWWRGAS

SEQ ID NO: 33393 - protein, 68 aa, Homo sapiens
MDRAAAQSLWAPTASSLLFLQSSHRPQPQPGPEPPEVVPLTGHPPAGGGRELFHAYGLPRFGTHFSTP

SEQ ID NO: 33394 - protein, 109 aa, Homo sapiens
LDVWNAGIHRDGVHSYTKACIGHTLLDLDQPFCHLGVAAVLRCLFASLGRSDLAVPQLPEDVLRVHPDAVQRARLAGHRAAGDHQPPSRRPQESPVPAAVANSNRESPD

SEQ ID NO: 33395 - protein, 148 aa, Homo sapiens
LPITIILTAQMTPLTALFFFLLACIGHTLLDLDQPFCHLGVAAVLRCLFASLGRSDLAVPQLPEDVLRVHPDAVQRARLAGHRAAGDHQPPSRRPQESPVPAAVANSNRESPGTECPQPGRGCLRALALGLGDDRFERQCERFGFHET

SEQ ID NO: 33396 - protein, 113 aa, Homo sapiens
LPITIILTAQMTPLTALFFFLLACIGHTLLDLDQPFCHLGVAAVLRCLFASLGRSDLAVPQLPEDVLRVHPDAVQRARLAGHRAAGDHQPPSRRPQESPVPAAVANSNRESPD

SEQ ID NO: 33397 - protein, 26 aa, Homo sapiens
MKNKWLSFNDACGMCVCAQAIILLRM

SEQ ID NO: 33398 - protein, 53 aa, Homo sapiens
VRLAPSGTEKARRQVSLEKTGLVLAGACVVGLWAAGLQRRKTTSSRFFFQFLL

SEQ ID NO: 33399 - protein, 73 aa, Homo sapiens
LRGHGQHELQHLTHVVAGVIPSLVHAHCILRGGERLDHLREDHCAPEASQGGVPGRRRRTDSGPSGERKELVD

SEQ ID NO: 33400 - protein, 72 aa, Homo sapiens
LLPGRSRGSAALGWPKGWRCDPAGQRRDSGAGRLLPPELGVRGRNELGAAAVAAGAVRAAPALGAAAALPEG

SEQ ID NO: 33401 - protein, 96 aa, Homo sapiens
VARGTRGRRGAGAVLTAAVLVGPVHAAHAEAALLRAVPLPTRRGRVGAAHRQELLPAWMKRRSRLCPPLRKIPSLFRSGETGFHHVSQDGLDLLTS

SEQ ID NO: 33402 - protein, 123 aa, Homo sapiens
VEGPAGQRRGLLLLWPAQICLRAGLAQPGPGAALRPAGPDAVALRPEAHRGPVRLQRALLLPLSQDPAGFQCPPAAAAGGLHHGPSGRLPTRPAGPCPRLHRPGAPHRRGLLHPHRHVLRPLQ

SEQ ID NO: 33403 - protein, 136 aa, Homo sapiens
LLLLWPAQICLRAGLAQPGPGAALRPAGPDAVALRPEAHRGPVRLQRALLLPLSQDPAGFQCPPAAAAGGLHHGPSGRLPTRPAGPCPRLHRPGAPHRRGEEALGLGDGGCLSSATLVPCSLLVPAPLGPPTLAPL

SEQ ID NO: 33404 - protein, 36 aa, Homo sapiens
VASHPRRRGAAALLGDLPAALTSAGCSMGRKRCPAD

SEQ ID NO: 33405 - protein, 13 aa, Homo sapiens
LFVHLIRLLFWKI

SEQ ID NO: 33406 - protein, 52 aa, Homo sapiens
MQSPRIQGQRRAQPSQLEAHGAEARSRCVTLAGVQWLLTGMIIAYCSLELLD

SEQ ID NO: 33407 - protein, 77 aa, Homo sapiens
LVLAAAATSLPLAAVLCRGTYTPPVLSARSRACRCLLLHANAGGQDHVSGKPEFAPPPPPRCKGYCAQQQLGRNAGP

SEQ ID NO: 33408 - protein, 53 aa, Homo sapiens
LAKFVILRNSAVLSSTASFCLPCSFPDVIQVAEFRCPCFGSLSLCLSFFPCSR

SEQ ID NO: 33409 - protein, 60 aa, Homo sapiens
LDYPRQGLCNIFFRLFWKDFAASRRSWTSALALWEGFGLSGSDFAISPWGLPWSRIHCGL

SEQ ID NO: 33410 - protein, 61 aa, Homo sapiens
LGRPGWMSQELPAAGHTTAFICALGPGLLLSLPSIGAQHPLPAHPSDSNSSPAPRPCVHFS

SEQ ID NO: 33411 - protein, 72 aa, Homo sapiens
LHPGAARRRRAPLPPPPPPGLPGSRGPGPLHLSFPAGHKAFCCRRGDWRPSLLIPLIFQFILCLFSGQSVTL

SEQ ID NO: 33412 - protein, 40 aa, Homo sapiens
LLRLVRRRSRNPAFFFSLRHGLTLSPLLECSGAITDHGSV

SEQ ID NO: 33413 - protein, 92 aa, Homo sapiens
VWAGTSGRQLLHFNSPFNVFNFLHRKHAVPSYYKPNCVCFGYSYSWLCSFSCLLHIYDIIYFSQKEKKQWPLVILLLFCLHHHVFHHFNQSF

SEQ ID NO: 33414 - protein, 24 aa, Homo sapiens
LHRVAWSCLSVLPATCLSSHPSTD

SEQ ID NO: 33415 - protein, 64 aa, Homo sapiens
VLSSLPITFYPLSLSSVSFWFSLSHSHSLPSSHILSVWVFLSLYVSLAQSLSLFIDPSLTLDLS

SEQ ID NO: 33416 - protein, 55 aa, Homo sapiens
MRRGAALATSAAAARLGPERRAGSQVMVVSSEGELSPARLVSTVELVATPAGWRA

SEQ ID NO: 33417 - protein, 114 aa, Homo sapiens
MPTARCISPTTGLAVPPATFAMPTESLTMSTTSLLMPTTSLVMPITNHAVPTTSSNSPTSRSAMPSAEYPRPTSRLSGPTSRCARAASKHITSTRCGIPARHATVTRRCATVTK

SEQ ID NO: 33418 - protein, 82 aa, Homo sapiens
LRGSPLGSSRHNFLIWKEQQNLLERLWVLHLCLQCVLLILLALFRTTAIIFLELQGQWHMKWATTLECFMTTILASVLLQYV

SEQ ID NO: 33419 - protein, 84 aa, Homo sapiens
LSPARPGSGRWLQLSFLALLCSVRAALELCSPGRSPSTSSAAEEPSASAPAPLSSAAPIPGSSLRGVELFPMTVLIRLHYTFVC

SEQ ID NO: 33420 - protein, 22 aa, Homo sapiens
LPWHRIILSFMTLWSQWTLKDF

SEQ ID NO: 33421 - protein, 52 aa, Homo sapiens
LVREMPRVLFPYWGFQGWGFREHFLFLGVMTAKLSCAVPFSVSVYPIAGDSV

SEQ ID NO: 33422 - protein, 101 aa, Homo sapiens
LGAGSESSGWERLHHLGAAWGSSLSVFLLMQSARSRVSAARGPVCNPARHVYSPPPRALPQVLLQPGPRSAAADPVHTARGYDPWDLPSAQLELPSWPTEQ

SEQ ID NO: 33423 - protein, 27 aa, Homo sapiens
LWFIIFPVFLGQMAHNTEQASGWPLPG

SEQ ID NO: 33424 - protein, 56 aa, Homo sapiens
LVYAVRGGRRRQRGAERGRRGLSRAAAAAVGPPAPAGGPKNAGRGPGGPAPGRPQP

SEQ ID NO: 33425 - protein, 54 aa, Homo sapiens
LCQRMDTFMLRYLLLRLNKNWDLPSKRALSLHIRTLIGCLITPLLRIFVLKMNL

SEQ ID NO: 33426 - protein, 69 aa, Homo sapiens
MAAVWVAAAAAAAGAASSSSTGTRASSPTCSTTTAPASCTAPRTCAGRSSKRSSPSGASTRPTWNPAAG

SEQ ID NO: 33427 - protein, 58 aa, Homo sapiens
LPVLHQLQPGALLAAAACCIDLLLLSLDAGLCLLLSSLTQWAHPQLLGVHQTDAAAGA

SEQ ID NO: 33428 - protein, 15 aa, Homo sapiens
LIDFLVLCLEVFAYL

SEQ ID NO: 33429 - protein, 33 aa, Homo sapiens
LIRLQAFHLPARLPLICMVNFIFLDLKFRLGLC

SEQ ID NO: 33430 - protein, 113 aa, Homo sapiens
MGKARRKPVPGPLGSLLLRAEAVHTRNPASPGLPRGSTPGGRAAAWARSRLCRKQIMTHFSGSPGPGPRAVASAKLSGPGHQLPASQPEATAAQHPAPFKVAPKRRKPNRSGW

SEQ ID NO: 33431 - protein, 79 aa, Homo sapiens
LGFGRVSGSRESQRRQCTALRLFLRLLLAPLALGVGHRCYETHVVEHRDASPAGRVMRRRAWLWSAGNLRNCQGPRAQP

SEQ ID NO: 33432 - protein, 56 aa, Homo sapiens
MKAVWWSWSCGLSPRREAATDRRCGLSLPVPQRALPVQLPRGPAGLCRAGCGGGLL

SEQ ID NO: 33433 - protein, 80 aa, Homo sapiens
VGFMSPKPKPAPVTAGLGLPTSWAVSCVLSFLPSEGEGVLGRENLSRGLLQMGKSWKPRSLSTEDPYSMQDRVSCCKSQL

SEQ ID NO: 33434 - protein, 100 aa, Homo sapiens
VMSTSKHPSALSLSLCCPGLASPLGHCGRCLPGMSKLCCSGASCHLLGLIPHLIPYREKCEFRWRVGPGPMRHQWKHSSKFRQVPLERKTMTGKCISSGV

SEQ ID NO: 33435 - protein, 18 aa, Homo sapiens
LPRTFWTRKLMKFLLLQM

SEQ ID NO: 33436 - protein, 38 aa, Homo sapiens
LHPFSLSLDDAAVIWLCVLTVLQQAELCRTAVLCVRAS

SEQ ID NO: 33437 - protein, 103 aa, Homo sapiens
VCRRRRMRRLLSGCGWRWSEAWCSSLVSFCLSLSSLGPPARGTVITSPREVVRAARRWAAGSPGGRAGGAETSAGLMSALSARGPSLPVRAGHCRMAPLLCGC

SEQ ID NO: 33438 - protein, 73 aa, Homo sapiens
MTKRARSLSSPASSSPQPSPKSRPRLMGWLRAPMVGGSATSHGSAWTEAQRAAPRRPGLASQRPCMTLRCQAT

SEQ ID NO: 33439 - protein, 57 aa, Homo sapiens
MVAATTCVPSGMGLLLPPEASCSNIDGPACQRVPLPSKNECLRSVLLWPQFSSFGTT

SEQ ID NO: 33440 - protein, 39 aa, Homo sapiens
LPERCWTLLLTLVLYPGSSCRYQTGTTRGHSRCCKPAPH

SEQ ID NO: 33441 - protein, 47 aa, Homo sapiens
LNILRTGIFVSALLMYPQQPELPDMSVIAALLIILPTADPFCETPGC

SEQ ID NO: 33442 - protein, 20 aa, Homo sapiens
LGLRLAFLLLSLQMNYCGIL

SEQ ID NO: 33443 - protein, 52 aa, Homo sapiens
LCWGSVIETDIEERSSYEDQGVQLSKTKASPVSFSFLGSVLGRFWVWTLFGD

SEQ ID NO: 33444 - protein, 34 aa, Homo sapiens
LGMGCWQGSKSLFLLISYSTNTSSDDFPKLMRMR

SEQ ID NO: 33445 - protein, 29 aa, Homo sapiens
MIALLCSPLWGVSPLLGRSGAPASPGCIS

SEQ ID NO: 33446 - protein, 80 aa, Homo sapiens
LARGAVPRPSTGFPSLGGSAFLLRTHFAVLGWLQLCPRCDLSCFCCCLCVPVLVPDPGARQRSPGVVQRPGRCWGPGDIA

SEQ ID NO: 33447 - protein, 134 aa, Homo sapiens
MLTCRANGMVYSVISCSPQRMSRLLLANPAPALKPSTTTCFTAWKKPRITSLWTNKSLKKAAWKLQLLIVLQVTVLHCLHNKESPAPAVHDDTKKLFASQMPMYQEAIKVVYKNSARFRSDVWREHLCLTADPV

SEQ ID NO: 33448 - protein, 59 aa, Homo sapiens
LESLSPCSPLPWHSCMHFKGSLWGLGFLPLPGLGPAPNPASPAPAHPHIGALLLLWCLK

SEQ ID NO: 33449 - protein, 10 aa, Homo sapiens
LSVFIFFIKL

SEQ ID NO: 33450 - protein, 61 aa, Homo sapiens
LALKLLLARLGSWLAGAEADRHGSRRGVKWSSDARTRPISLSSTAMFLLLSCCKATHLRFP

SEQ ID NO: 33451 - protein, 22 aa, Homo sapiens
LVILWILFFVILKRQMRACINH

SEQ ID NO: 33452 - protein, 33 aa, Homo sapiens
LQPVSLLYTMVSHGCHVPLFALFMVLPSSQGLP

SEQ ID NO: 33453 - protein, 84 aa, Homo sapiens
MDAQRTPNPGLGSRNSQQELGALGHWAVVPLKPTLALALTCFSSSLGLSSLHLSPPSTQLSCSKHSTLHLPFSPTTAAPPGLLL

SEQ ID NO: 33454 - protein, 98 aa, Homo sapiens
VEEVCQAHVLSVLLLLFLLQHHPDPRLVLPPPGGGGHPAPLGPDAQDGVAAAPREDVCAHLGHVHLCERGHCHLPAETLGSAVHPLGCLVPLCLPWPR

SEQ ID NO: 33455 - protein, 83 aa, Homo sapiens
LTESKKTKNQRTSTPLWVTSGVFTWLPGYLAWLSSYQHFWHLQLDTSVSSETVGRSRRTTEEQQNSAPEHSCEPLENLKFHFK

SEQ ID NO: 33456 - protein, 83 aa, Homo sapiens [sequence omitted]

SEQ ID NO: 33457 - protein, 124 aa, Homo sapiens
VMVWLPRPSLGWVWGWSGLAHASHLCLHLCCHPAPPSSSSPTSSSLCASVSCRKKWVEPERRLSEEGRGRAWGGSPTPHPKPQGLPPGSGRGRSWLCGVVAPLLLPCFSHLSCPSLVPTAVHHE

SEQ ID NO: 33458 - protein, 115 aa, Homo sapiens
MPLFFLILDIFLFPFNSWFLPKRSHVRTSLGMCLQEKCGLPSSPWMPVGSLPHPGCLWAAFLTLDACGLPSSPWMPVGSLPHPGCLWAAFLTLDACGQPSSPWMPVGSLPHPGCL

SEQ ID NO: 33459 - protein, 19 aa, Homo sapiens
MEVLLRKTLSSEVKRDEDA

SEQ ID NO: 33460 - protein, 214 aa, Homo sapiens
LIAGGSLAQRPARLTALPALPSPARAPAGTAAAPRAAPASARAPAAAPTPARTPARVPAPPAALAAAAPAAAPAAPAAATSSSSAAAAASALAGFLYVGSARALRVARAAGGRAPGAGERLCVRVCVCAGVRARRRASVCARRGPCPPPPALRPAPLPAAACAISDFATWGRRKKREKGACSPGGGEGGRRARPPQERSAGGAGEGSRGVGGGA

SEQ ID NO: 33461 - protein, 62 aa, Homo sapiens
LYHFLRCLPRNMVTQSKQTRKCMPLAFVISSLPSSTVLLLVQLLQRHWLKNQQAAILSFLVW

SEQ ID NO: 33462 - protein, 56 aa, Homo sapiens [sequence omitted]

SEQ ID NO: 33463 - protein, 41 aa, Homo sapiens
MIINCAGIQWNMMALRLFAFLQIRFGSPTLFSITMLLVTSK

SEQ ID NO: 33464 - protein, 54 aa, Homo sapiens
LCFVSGSFLFCLLSCFLALGFPSSEVNTEIPDVSRDILKRLGGGGALVCPQRDS

SEQ ID NO: 33465 - protein, 141 aa, Homo sapiens
LAQVEAPATLGEAAAHSRAAVAVAAMVTTTMAAAVVAAAVAAAVAAAVAAAVVAAVATVVAAEVTAAVSPPGDPAPAPPPATTVGAAEEMDINPGVKSQGMKPAGAGNLGFRTLRRLLGCLTLTLSGRILNPSWVSSTGMP

SEQ ID NO: 33466 - protein, 28 aa, Homo sapiens
LKMSNEASVLHLQITELVFFSFLAFFFF

SEQ ID NO: 33467 - protein, 64 aa, Homo sapiens
LMLPPCRLTWPSPVNTPPEGLCFLFASNHIFSIEKSFLSPVHYESEVYFFFVFFFVPVYFKCIF

SEQ ID NO: 33468 - protein, 113 aa, Homo sapiens
LLLASFPALWAIQMMRNGGSRTHLPCPSCEGPASSHSWPSRGPRWPGLTSPDPGPCPSAARAGPGPPHCVPEGPAHPTVPHGASRGPPAPRPASDGQPRWGQRALHTQPCAAA

SEQ ID NO: 33469 - protein, 82 aa, Homo sapiens
LTFLLQAPCFHIFPLTVSCCCCCYYLQGPQKWNTERRSVRMPICPASTPQPPQGTSCPSAGAKEPVLCLNVATWCSGLMKGM

SEQ ID NO: 33470 - protein, 42 aa, Homo sapiens
MRSTLLLTCSAGVSYRIPWQLAVDTCRAVRRPVGAVGVLQRQ

SEQ ID NO: 33471 - protein, 148 aa, Homo sapiens
LRFTKHSASPTVILTVLSGGLTQVAVQPFRPRAARSEARSPAWKRSAVGRAPLRLGGLGFPQQRSSTAQSSLTPDATSYLGPELNSRRCGPPSLNLFSQDLSPTAKQPWAGAATSPRHPFGAADIQRGRTRERALSCFTARVREFAAA

SEQ ID NO: 33472 - protein, 268 aa, Homo sapiens
VLLSFPRLTLFCNFLFMSLEATKWWEIRDSNIWWPCDVSKLLDFSQFPFPIKWVVLGIRGSNSAGNRGRNRQLRPRTSPKPRAATGTTVRGASVKRTGGPAPAQPSPPGPLPPTPHGPHARAETGASPGSPVRQPLPGPAPQREAAWGRRRVERAAEDKEEVAVENKKELSAVCPDAGRRWGQARPDLHAIPAGVPACLREGKDPGRLLPKVRLLPKVRLLPRGPHKARQTLQPDPDAPPSRMHMRGTLPETHLPERPGSTRANWRAD

SEQ ID NO: 33473 - protein, 52 aa, Homo sapiens
LGKRTRAPSWGTGSFAFYFFSCSQGAHVFETDRISSSMWRQVDFSRLAGISF

SEQ ID NO: 33474 - protein, 38 aa, Homo sapiens
LPCSLSTTPSSTDQRTRSSMLTMPVSTSFSLAVTTWFC

SEQ ID NO: 33475 - protein, 142 aa, Homo sapiens
LRKSTLWGPTPCDVCLVACSLFYLQSTVPIRAARSASCLIWKTTTLGSQRNDGSLGVSKIGSEWPHGDGGPVSGSLGPPEMVLHISILKTGEVRPQTSQAFSFHWKLDIFPPGFLGKPNGAQKAVWTSVWVLSWSSDVYCYF

SEQ ID NO: 33476 - protein, 41 aa, Homo sapiens
MKCGSILCSGLAASPGRICLQTGLLLYQLVPGPAGTRKIHP

SEQ ID NO: 33477 - protein, 78 aa, Homo sapiens
MCFLNPPTPNLSPLCLSLLLAVFLFSFSSALVSWTPLLCPFFLFITQSAVIVISMASSLHSSSCFQPPKPEHCLASNH

SEQ ID NO: 33478 - protein, 75 aa, Homo sapiens
LVRQTFPTLCPAGAHASVAAAADPDSWKRTIRGGPKSCTSPQSSMVHSLQRRKSGSHMQQHITFPSPGRHILVSR

SEQ ID NO: 33479 - protein, 66 aa, Homo sapiens
LGRAGSARGLLCISLHFSDVWSSPGPGRSGVRAGAGGVGLGVGAAFPAAGEPFASELDPGDITALG

SEQ ID NO: 33480 - protein, 49 aa, Homo sapiens
MFCFPCLMPVLHLSLQFHCVSLLLGILKSGTKLLHDPCTFASAYIIALL

SEQ ID NO: 33481 - protein, 99 aa, Homo sapiens
LGLGMWYRLLAAAGSRAVARPLALLWRCGGPGGGRTAKTSARALGKARQKKLGKLIWPPVPVLPGDPRSEADSAGKTDVIFLVAVFKTTQRYLSFIHHH

SEQ ID NO: 33482 - protein, 241 aa, Homo sapiens [sequence omitted]

SEQ ID NO: 33483 - protein, 19 aa, Homo sapiens
LPGTLHLKSLCLCCVLLSA

SEQ ID NO: 33484 - protein, 88 aa, Homo sapiens
LRRLAQTRKRMAWTESCTAACAFPSCLVLLYRGRGVPTDLQVPAPLFSTQSKLKRPGESPISKDSCYVRKPPRRAKKRSQGWLFLRDA

SEQ ID NO: 33485 - protein, 20 aa, Homo sapiens
MFWSCIMCHCLLALSSLLLL

SEQ ID NO: 33486 - protein, 97 aa, Homo sapiens
MGERAGQFLANKRWLTALTSAVNSAHLASGATPASAVTSTTVATGWRSLVGTTNTSMSAVAKISSTSTTCSGLPPSSTLLACSWASSLPLSLEALRT

SEQ ID NO: 33487 - protein, 86 aa, Homo sapiens
LRRLTALTSAVNSAHLASGATPASAVTSTTVATGWRSLVGTTNTSMSAVAKISSTSTTCSGLPPSSTLLACSWASSLPLSLEALRT

SEQ ID NO: 33488 - protein, 70 aa, Homo sapiens
LSLPRGSLIPGKDYWAGSQEAWGTLSSAANMLHDHGLTGEPEVLCRDQRKALIPSLQPVQLSTWLTLGTQ

SEQ ID NO: 33489 - protein, 66 aa, Homo sapiens
LGSGALVPASAAAAAGSQWPGVLGSHRPAASIAPNLRGAAAGALGRRGSAKAADAIFLPRRSQGNR

SEQ ID NO: 33490 - protein, 164 aa, Homo sapiens [sequence omitted]

SEQ ID NO: 33491 - protein, 22 aa, Homo sapiens
LLHLIYWAISLSCLDHCRLPER

SEQ ID NO: 33492 - protein, 28 aa, Homo sapiens
LPGVYSVSLAFSLILMDIVWARGRDGWL

SEQ ID NO: 33493 - protein, 63 aa, Homo sapiens
MRVPQLGSATSCGVALAPGAAATSPPAQPPGCSSPTRLGCLCCTLSHSGWNPGPGTRQRSLLR

SEQ ID NO: 33494 - protein, 40 aa, Homo sapiens
MTQLLSRVSGLPSASAGSARAQSASAPPTDPGKVSGLPQS

SEQ ID NO: 33495 - protein, 51 aa, Homo sapiens
VDLLPHQAHPVHRVPDDHAAGWLQWTTCLVLSGSGFGGSLSVVEPVTEAVL

SEQ ID NO: 33496 - protein, 13 aa, Homo sapiens
MRYVFILIACVLQ

SEQ ID NO: 33497 - protein, 64 aa, Homo sapiens
MHMADAGLAQALVCPPARPHERQPRCLGVLQEQALQQAHPGDRPQRVCSVEACGPQLCSEGISE

SEQ ID NO: 33498 - protein, 63 aa, Homo sapiens
MWVKCHPQPFVGPWAPCTSWASSSASSSPRQLDETSKPDRCQPSRAWGSFLQPAMMSRRIFRT

SEQ ID NO: 33499 - protein, 115 aa, Homo sapiens
VASDLGLFLYLHIVVLYTIAKVGLLSTLLCLKLQRFCPDVSWNNAEDCLSGSRPIQFTSSRKYLTPALDPAALLRAEEGGNPMCLLPELPQPIFPQLGTWKKEPRTRLCFSFGPS

SEQ ID NO: 33500 - protein, 116 aa, Homo sapiens
VASDLGLFLYLHIVVLYTIAKVGLLSTLLCLKLQRFCPDVSWNNAEDCLSGSRPIQFTSSRKYLTPALDPAALLRAEEGGNPMCLLPELPQPIFPQLGTWKKEPRTRLCFSFGPSW

SEQ ID NO: 33501 - protein, 25 aa, Homo sapiens
LCWGTAAVVAAAIAQTAGSACRSPA

SEQ ID NO: 33502 - protein, 34 aa, Homo sapiens
VIATIMDVDRCRGILQPNWISICICFLIPSSLAE

SEQ ID NO: 33503 - protein, 103 aa, Homo sapiens
MAFISCSWHLGIPRMIPGPRSYRFRQLFLQTQALVVCLSLALRPGDIHLPTLLGTADYQEAPSALLPSPWQRGTMTTLFLFQLHVTAWKLLPSLISLLQVRMN

SEQ ID NO: 33504 - protein, 103 aa, Homo sapiens
LECNGKISAYYRFDLLCSSNPPTSAFQVAGTTGGDSQKEIGSWQQMMTMVMEQVYLMSFLLLLLRTMMKAHWTYTLGWTVLFLTALPNPVYHQEIVWTYMKRS

SEQ ID NO: 33505 - protein, 65 aa, Homo sapiens
LRATLWGPAPWFLLLPLPPPDPSGPACSAPTGLQPASHRTFGGPRLERSAGVGAPRPQTLQKEQQ

SEQ ID NO: 33506 - protein, 34 aa, Homo sapiens
LLILLLLLLTTLRVKLCDRPRRDGAISVCGGAGG

SEQ ID NO: 33507 - protein, 74 aa, Homo sapiens
MPPGRLLCPLGLQPEACPSALGPDPRPPAACNQTLFASSRHPPSPAPHTVPGSPLPRRSVPLPSPVTFACWSPG

SEQ ID NO: 33508 - protein, 28 aa, Homo sapiens
LAVFHSLCVHAAGGASGPGGAAAEYFWL

SEQ ID NO: 33509 - protein, 71 aa, Homo sapiens
LLCDLRPVCRPLWASVFPAMKTAISQSCVKQKRKAGGRPWANGRALVIINIVAAVVLLLLINIHIIYFILT

SEQ ID NO: 33510 - protein, 55 aa, Homo sapiens
LRFDFSHSLTHRRRTKERNEIMLTMNCSLHQLISLSLSSSLSLSPIPQGKIFLKK

SEQ ID NO: 33511 - protein, 52 aa, Homo sapiens
LQLSIFGREHWTRSQKVEFWVLFSHSWALGMFCSVHQMFSACLPLSCHQSHL

SEQ ID NO: 33512 - protein, 58 aa, Homo sapiens
MCKLHQEIPLHSGLPAAGHTQEELCLPIWLLLLPGLLLHMCQEDPGAGLLPWFLWHAV

SEQ ID NO: 33513 - protein, 117 aa, Homo sapiens
MAATPRLWSSTGRSCSFGSALTTLWAVPWPTARSESAWPRWRTTRLPCSTSTSTWSWHIPCATTRSCRGPGPPSAAPTWTSMTTASRGMLCCRHRLPLRRAWLLWMRSWRGHWPRES

SEQ ID NO: 33514 - protein, 176 aa, Homo sapiens
LASSPALWAASTTLLTMCTSRAPTCGWPCTRTTCRPPIPTMSTRRATWTRHLVGPCSSCGPTTRSGCRCRRTRPTASTPRSTSTPPFQDSCSAPHNPRGGSCCPGLLPFSGRATFSITKNLLEKKTKAEQRRPWPWPEETNLLSPCMQAEIVSGRGWPEFLSPKCLCSVRAAPHRP

SEQ ID NO: 33515 - protein, 58 aa, Homo sapiens
VSLWAGHPSPDSFSESFLLCCLLHLPLLQGSSLILKCLRPLGQLFSSHQLIHRRQTHD

SEQ ID NO: 33516 - protein, 97 aa, Homo sapiens
MYKFTRLFFFFLFFETESHSVAQAGVRWRDLGSPQAPPPGFTPFSCLCLVSSWNYWRLPPHPANFFVFLVQTGFHRVSQDGLDLLTLGSARLGLRKC

SEQ ID NO: 33517 - protein, 27 aa, Homo sapiens
MCTFLVAVSRPGIFGLQWRWLCSPHLP

SEQ ID NO: 33518 - protein, 52 aa, Homo sapiens
LGLALLASVLGFFLCTAGLALLTSPGVIEHPCACCHPLPVCRIPDSVSGDRN

SEQ ID NO: 33519 - protein, 39 aa, Homo sapiens
LNLSLVVALTVPYSHRMGCCLLSVLENMGNLVIIQHRMS

SEQ ID NO: 33520 - protein, 52 aa, Homo sapiens
MKWRSPMSIIAMSAAGSNPHNLWVVALQCHRSNHLIFELGVLSFSETMSCVT

SEQ ID NO: 33521 - protein, 25 aa, Homo sapiens
LEFWMIACVILTASITSIPTKSSPK

SEQ ID NO: 33522 - protein, 46 aa, Homo sapiens
LPRAAGLKAAGASCAEVAQLLWRRRANTWCLGVAAPPLAVSSFPFG

SEQ ID NO: 33523 - protein, 108 aa, Homo sapiens
VRRSPSFPPFILAQTRLGRTGPLALCLLLLLHGAMRLGGGSREKLACGRAGRAARTGRGEGGRQAEEEAAGRRRRRRPGRTRGIPRAAGGLSRAGTRVLRYPSSHRRQ

SEQ ID NO: 33524 - protein, 89 aa, Homo sapiens
MRCSGGCTWPDSPSCPVHSHLPVERTLRVPSPGLVTCVCAGAAHEDCLPLRAWAAAAAILVLGNGAAWPSHSLVSCLLSSCPSYLPKVP

SEQ ID NO: 33525 - protein, 24 aa, Homo sapiens
REEAQLVMLLLLLLPPPPPLLLIL

SEQ ID NO: 33526 - protein, 43 aa, Homo sapiens
IPSPQLQTSRLIGGEHSFSLLFGMLCCLVVTVPMGELYRKIVM

SEQ ID NO: 33527 - protein, 31 aa, Homo sapiens
INNGARKVEMDAYTWGIVSGRSVCVIKTCST

SEQ ID NO: 33528 - protein, 52 aa, Homo sapiens
VEKVWVREELSVIARFCAITSRASLSQLSGALLVAAVSSEFLALSMRRLVVF

SEQ ID NO: 33529 - protein, 28 aa, Homo sapiens
KQGQMRTLRPRETKSFAQEDKGNHQKST

SEQ ID NO: 33530 - protein, 92 aa, Homo sapiens
VASAGRAISAGALLPPPGASAALDVCARRRLSVAPKLLPGSDLVRRLRSRTLARKEPRDSCGQSRVESWAFSLRVFWWFPPWSLTIALREPC

SEQ ID NO: 33531 - protein, 53 aa, Homo sapiens
IQNLRAVLPKTPVCLVKSVGCKQFVLVPGPQLLMKWQESTEAYFEVPGASRGD

SEQ ID NO: 33532 - protein, 33 aa, Homo sapiens
IHWSEMEIEEKLRARRASGESLSFGKAGNLHSW

SEQ ID NO: 33533 - protein, 11 aa, Homo sapiens
LETLALGLCLL

SEQ ID NO: 33534 - protein, 25 aa, Homo sapiens
IPHNTQAFLWGMGTVDLWLLRVPTN

SEQ ID NO: 33535 - protein, 88 aa, Homo sapiens
MSSCGTLTWATSSPAHPTWAPGCGQVCISSCPTWASMRSSRRCLSGCDFRSEAQAVWTRLRWAGSSTSPTLTAWASQRWSWCRWWWTE

SEQ ID NO: 33536 - protein, 36 aa, Homo sapiens
IQVTETKSRKRVSGMFPLKAKWRMKAITKMEGYFQD

SEQ ID NO: 33537 - protein, 9 aa, Homo sapiens
ILSLDLPNT

SEQ ID NO: 33538 - protein, 42 aa, Homo sapiens
IHCLDKSIFSGRVPGSSSSFLLFLLLLHLRLLGDHCPLSAAE

SEQ ID NO: 33539 - protein, 11 aa, Homo sapiens
LAPGNSIKASS

SEQ ID NO: 33540 - protein, 28 aa, Homo sapiens
RTRITPAAARQPAPSVQWDARDSDGRIQ

SEQ ID NO: 33541 - protein, 5 aa, Homo sapiens
IMFGS

SEQ ID NO: 33542 - protein, 41 aa, Homo sapiens
KMAEMILKITEEREDQPEFPLDICVFLFFYFVLFFLLLLLP

SEQ ID NO: 33543 - protein, 36 aa, Homo sapiens
ISNSSLPPSVRLMALLAGWIIELSGGTDAAAIPNKS

SEQ ID NO: 33544 - protein, 82 aa, Homo sapiens
LEENVPGIEFFLEAKYSEVDGRGLRSSTFALVPVFAHLSILQSLVPAAGAASPVAISAQHLCYSHVTPGDPGAGAGQGPAPS

SEQ ID NO: 33545 - protein, 68 aa, Homo sapiens
MFTAQSMCSPLCTPSQPGAGAHCSGLPQGGSRVSPSAPGGMGVEPGILNTSLRGGINKTVSVPPAPRS

SEQ ID NO: 33546 - protein, 29 aa, Homo sapiens
LETPRDMVLLCCQSGLKLLALSDSLTSDS

SEQ ID NO: 33547 - protein, 87 aa, Homo sapiens
RWWRLRKSAWTLRLRVCPVLPSERSLCLRSLTILILSSCWMSFTQKINSTWFLNFCTKISRNSWMPLLSLAFLFPSSRAICSSCSRA

SEQ ID NO: 33548 - protein, 38 aa, Homo sapiens
VMCARFRKAAHSRFLGVSAAVGSWGQGPGCWGVGRGSR

SEQ ID NO: 33549 - protein, 24 aa, Homo sapiens
MRLSLLQLGLFHTPCSCAMPGGTV

SEQ ID NO: 33550 - protein, 37 aa, Homo sapiens
MLLSLVSNPLPLSLTPLFSTRLSLSPRWVSILEVSHP

SEQ ID NO: 33551 - protein, 139 aa, Homo sapiens
MEVSSKPHRAPAAAPLAGWAPSAPCPAQRAFTDPTAPRNVAATTAASVTDSLGSAAALRVTLGIGAGRSARWAALGRTVLRRATAPRTPVASRPTAHVCANTASLGTAARIASAPTASTVSAARPPAPATGSTASAATR

SEQ ID NO: 33552 - protein, 29 aa, Homo sapiens
MSSQYGGGDKPPHTQFPQGVPKNFGAQNR

SEQ ID NO: 33553 - protein, 27 aa, Homo sapiens
MSRAAAAAAAAEGRCASTKWWCWARAG

SEQ ID NO: 33554 - protein, 97 aa, Homo sapiens
MFLITQEDGHATGRPRTLHPADGCSRDCQTETTPHTQKAPKSQSLILFLERHCIILDHKICVIGFVSKTWDSGDKTSLQGYLCHCILAAFEAKHFNI

SEQ ID NO: 33555 - protein, 28 aa, Homo sapiens
MFEDCFILPLVPAVSLFCDQCDSQELLK

SEQ ID NO: 33556 - protein, 96 aa, Homo sapiens
MKRGALRFYLPCYIVFLGKAVLPYSKPLPSLPTQDLGTGGARHLMPCPRLAGPSISAGELSSADKPAWHGALPLLLVPDPFCPEENFLSPGDAWPR

SEQ ID NO: 33557 - protein, 32 aa, Homo sapiens
MKARKLKLEEHLSATCQFCVSVLYVCVNFPLK

SEQ ID NO: 33558 - protein, 130 aa, Homo sapiens
MPWLPGPPGPAAGPLRRGCRGTAFPLPWTARCPGLRPQIPLPQRRGAVTPTPASPKPPWGPFRPPYSIFQTPGDHRPSQWLQGLPQRSPKMDTQPQRQQEKHMGIFFLYFNLIPLKCLFFIVFFIIYIIY

SEQ ID NO: 33559 - protein, 52 aa, Homo sapiens
MDINPGVKSQGMKPAGAGNLGFRTLRRLLGCLTLTLSGRILNPSWVSSTGMP

SEQ ID NO: 33560 - protein, 84 aa, Homo sapiens
MLYEGHIPAKRHKVTEWLPLSGGEKRWMAGTRREGNKYMKKYNPLGQCLAQHKCPGKRGPVAYVPGDRAGTSAGFLVKEATLSS

SEQ ID NO: 33561 - protein, 61 aa, Homo sapiens
MSPHRQAELHLRSPPAAAEERRARPRPGRNPHSLCAPACLKDKVYLQRRDAHIKDNETPKC

SEQ ID NO: 33562 - protein, 16 aa, Homo sapiens
MSRMKTDGLLAPISLA

SEQ ID NO: 33563 - protein, 108 aa, Homo sapiens
MQWRDLSSLQPLPPGFKRFSWFSLLSSWDYRNAPPHLATFVFLVEMGFLHVHQASLTLPTSDDPPASASQSAGITGVSHRAWPKPSSLSFCGCCCEICRTSSCLDSIF

SEQ ID NO: 33564 - protein, 53 aa, Homo sapiens
MKHLQNCPNGPSGDPGNKCLSSHDQSFYFFLILCIWLVYMSQNQVLKQEVIQK

SEQ ID NO: 33565 - protein, 44 aa, Homo sapiens
KPPVFLHLALLYLQAGSPEIPAPNPPCTLGPALLPPERTFLQLF

SEQ ID NO: 33566 - protein, 13 aa, Homo sapiens
MTLSRSLFFILFF

SEQ ID NO: 33567 - protein, 21 aa, Homo sapiens
VSTRCFVVSVFLLFTLPESVL

SEQ ID NO: 33568 - protein, 50 aa, Homo sapiens
IFFRLFWKDFAASRRSWTSALALWEGFGLSGSDFAISPWGLPWSRIHCGL

SEQ ID NO: 33569 - protein, 14 aa, Homo sapiens
LVRFYKILLGWFFF

SEQ ID NO: 33570 - protein, 22 aa, Homo sapiens
VLGLLLLTIISLSLPAFIFSPI

SEQ ID NO: 33571 - protein, 31 aa, Homo sapiens
KGILNAISSLLALGHFLLDPALLSAIVKDQP

SEQ ID NO: 33572 - protein, 16 aa, Homo sapiens
ILKFVNLLMVVVSHGR

SEQ ID NO: 33573 - protein, 14 aa, Homo sapiens
IFCKILKILSFFSG

SEQ ID NO: 33574 - protein, 9 aa, Homo sapiens
LLIFLTVVS

SEQ ID NO: 33575 - protein, 54 aa, Homo sapiens
RLALQVHFHSSLRPLPWGVMFCYRDPRYQIAPGLIWGLGICHSAVQTLIFFSSF

SEQ ID NO: 33576 - protein, 14 aa, Homo sapiens
IFNALFKIAFFFSA

SEQ ID NO: 33577 - protein, 17 aa, Homo sapiens
VYLLLLMIVRTTSFLLL

SEQ ID NO: 33578 - protein, 28 aa, Homo sapiens
LGCRLSAAALGWCAVVRPRLTAASATQM

SEQ ID NO: 33579 - protein, 17 aa, Homo sapiens
IPHAGHRWKCQTVRVHA

SEQ ID NO: 33580 - protein, 37 aa, Homo sapiens
MRGLSAAAVRAICWSSRTAKRSRHTTVCAGSQRCLSL

SEQ ID NO: 33581 - protein, 35 aa, Homo sapiens
LPGQVLPGSLGAVAWVLTMLLKLVQNSSQSLTSAS

SEQ ID NO: 33582 - protein, 59 aa, Homo sapiens
RSGFRLETLAGLRSRRLKQPKVSWSLCDSGKKWREHSVSPTSFLTLLPYLSFFPTGLSR

SEQ ID NO: 33583 - protein, 69 aa, Homo sapiens
RPPPPLLAAAMESSTFALVPVFAHLSILQSLVPAAGAASPVAISAQHLCYSHVTPGDPGAGAGQGPAPS

SEQ ID NO: 33584 - protein, 28 aa, Homo sapiens
MERSMMILLMAASMTMTSTQLWSFCCVH

SEQ ID NO: 33585 - protein, 26 aa, Homo sapiens
LPSGALLVAGVSSAFLVSSTRRLAGF

SEQ ID NO: 33586 - protein, 73 aa, Homo sapiens
IKLLFFDNNDAMTWTKCPLPLGPAFFTQCCLIGLLVPLLGWGNQNTQWYPTSKMPDLKDSKTTDLCQHVKHMV

SEQ ID NO: 33587 - protein, 19 aa, Homo sapiens
MFLDQIVQIALVFNLLLLD

SEQ ID NO: 33588 - protein, 76 aa, Homo sapiens
MSFFLFSEFTTDLSVLIKHGIQKTTKNLSFNFIWNSTVFLAPWTRLTCWLFPLAALSRGALRLLTPSVKNLRLACF

SEQ ID NO: 33589 - protein, 38 aa, Homo sapiens
LLAGYFIDTLKVLHMIRKQLWKMTAFISLNILPYGTDQ

SEQ ID NO: 33590 - protein, 32 aa, Homo sapiens
VRPANLIKILLESALLVSYLCQISSWETAVTT

SEQ ID NO: 33591 - protein, 50 aa, Homo sapiens
KTSNSVFLCGFRCCKWSVSYASTFIHYLCWILCLCGILWICLRVAQLRIV

SEQ ID NO: 33592 - protein, 31 aa, Homo sapiens
VEGGSPSWLAILLLCVEVLPVACPNPKLEEE

SEQ ID NO: 33593 - protein, 37 aa, Homo sapiens
ISSALKNLSCPQFIMSRRFIFSLCFFLFQFILNAYFS

SEQ ID NO: 33594 - protein, 18 aa, Homo sapiens
IGMKWLLVAAWRTPAALL

SEQ ID NO: 33595 - protein, 48 aa, Homo sapiens
METIRRLSIHLNKYLALTPPRRNSLMLWLIPWSMTSFMAKMVFFLHMV

SEQ ID NO: 33596 - protein, 145 aa, Homo sapiens
LSRLALIAIKATNKFIEMLFPSGNLNLSLACTERGSASGVGEMRRRMSSAYHVVQTQADRGPQKCKYVSSVGNCILGRKSYVLEYHKHPFLPCGTAQRWCEAIHRREVPRTQFSWLKDSNVYISSKRPTLLELHFTCEIRVLGSE

SEQ ID NO: 33597 - protein, 96 aa, Homo sapiens
LNPPVPGLPPEEMIQKVLICLNALLMSSLFANHPVLLCLKRQKKSTVVLAKKLHCQRETHVSSVFTNFLCELPNAFFFRINNNFLKVGQKKGPCPL

SEQ ID NO: 33598 - protein, 15 aa, Homo sapiens
MHRLHPEMEPARTTN

SEQ ID NO: 33599 - protein, 38 aa, Homo sapiens
MCLGLLFCFMPLSLVVSSEEARFKVAADLCGFATGNSW

SEQ ID NO: 33600 - protein, 61 aa, Homo sapiens
VFLVVSDGCLYICWVSGTIPFIIFNCVYLDLLFCLISLASGISILLIFSKNQFLDLLRSLQ

SEQ ID NO: 33601 - protein, 67 aa, Homo sapiens
LLLVNGLKINFLIIIISLSSSDLVLPKLLVIFEDRLSYHQGNLYKLRLTFLEFTILAINFGRLIQYS

SEQ ID NO: 33602 - protein, 68 aa, Homo sapiens
LGRRAAAGGGGHVATAVAARAAAATAAAASARAAGRPPTLPPRGSPSSLHLAPLVPLARPGAALCFSL

SEQ ID NO: 33603 - protein, 89 aa, Homo sapiens
LLFSRLRVVGLHPAFRVLLRGAPVSSPAQAPLQAAVGFRFASGWGCCFSSPTWILYPSETLEPLWSSLHLMTLRGWSFQVLPERNVPSL

SEQ ID NO: 33604 - protein, 69 aa, Homo sapiens
LPLGGFLLDYGRCLLSFAVKQRLIRRLLGGWSLSPTHILASHSGWGLPQRGQLWQGQGPLWDWDEGATP

SEQ ID NO: 33605 - protein, 23 aa, Homo sapiens
LASVLAVILAVFFFFLQGISVST

SEQ ID NO: 33606 - protein, 114 aa, Homo sapiens
LRICSQVGLLLSLSCRAALPCFGVPEAVPRASPCFWLVLHWQGDGLGDLKDWCLTGSSSDQEQSPASASMQCLQPALDPPARRLCMPPICCAHPCCSCGPADNSPHEAPSSQLG

SEQ ID NO: 33607 - protein, 94 aa, Homo sapiens
VTELKSSASRFSSEVRLSKGPMTLFPAPFHFFLLCSYVSIPPCKAFQISQEGRCKQKKEKQPTTKDNQGSQQKCGISQDFKPWKIKAINSRKRC

SEQ ID NO: 33608 - protein, 57 aa, Homo sapiens
LLLAFPYGLYLAFPYGLYSTYCLENVAHETPGYYQKERGRRSPLSPEPQHLLVWKGY

SEQ ID NO: 33609 - protein, 29 aa, Homo sapiens
MRRAARVTFLQILHAVHLCPRRTTAAHDS

SEQ ID NO: 33610 - protein, 31 aa, Homo sapiens
MAWTGGAGVTFLQILHAVHLCPRRTTAAHDS

SEQ ID NO: 33611 - protein, 48 aa, Homo sapiens
LKMNPHFKSSCLLEVALPVTSLHFSIHGCYSRKSSFLKHISRHMMRLM

SEQ ID NO: 33612 - protein, 27 aa, Homo sapiens
VGTPTRLRAFSSLLFFPFASLLTSPAH

SEQ ID NO: 33613 - protein, 39 aa, Homo sapiens
LAPRFCALGERRGARDRIGKLRPPLTILLIFLCARLLVC

SEQ ID NO: 33614 - protein, 68 aa, Homo sapiens
MQVQVTILFLATSCEKTNIWVTLVSTLVLLLVIVASAAIDHTRVVIQKLVSLFICLVNFIIWFLSITN

SEQ ID NO: 33615 - protein, 114 aa, Homo sapiens [sequence omitted]

SEQ ID NO: 33616 - protein, 100 aa, Homo sapiens
LLSAASPRRCALQLFVDKGTPDFCGFSPFLCLPIVVLFCGPALGAGSSFRQPGRSGTPLSTDGWEGSWGGRVGGRAGDGWEGRGGKGGRNGKQLFWWLPL

SEQ ID NO: 33617 - protein, 64 aa, Homo sapiens
MGSRVLGSCSWPVLLWAGLWAAHGRASDKLDQHCPCLRGVSLVFFFLDDYLKGKGRQRVRKGLA

SEQ ID NO: 33618 - protein, 53 aa, Homo sapiens
LASLCTGGGVVSLPGFKAPFQPVSPAFLTLGWILPGLGEMTASMRRPCAEVVC

SEQ ID NO: 33619 - protein, 79 aa, Homo sapiens
LCPGVGTVPPSLLFISLCLFIESNFASVSICKYVSPHRMSPPSLTCLFLSCPGPCHPSGLLCVALSASVWPLAPHPCHG

SEQ ID NO: 33620 - protein, 26 aa, Homo sapiens
MMKSAFCFAESLEIILVAVWSMCWRY

SEQ ID NO: 33621 - protein, 50 aa, Homo sapiens
LLVQSSYSATSSAFPASIVMLVLPGDTLLTAETMNFLQTRQCWWLLHSSG

SEQ ID NO: 33622 - protein, 110 aa, Homo sapiens
LGSSACWPQEYEFSSRDFWDSLHLFLPTGAHGGEAPTDPALDGPAGTTQINKLAYLNLRPPTQELTQCKKTASTPCDFISDQSALLAHWLPQPMKFSLKTLLPKCSGRLI

SEQ ID NO: 33623 - protein, 20 aa, Homo sapiens
MLGSGGEHSSQLAMRSSGYV

SEQ ID NO: 33624 - protein, 11 aa, Homo sapiens
MMWTLSAGGEG

SEQ ID NO: 33625 - protein, 23 aa, Homo sapiens
MSHLEKRRPHSRGFHDVDTFSRW

SEQ ID NO: 33626 - protein, 43 aa, Homo sapiens
MKMWYNQELRSGRSCSCLNLDHLCFLLLLCAIPLPVPQFYLEP

SEQ ID NO: 33627 - protein, 64 aa, Homo sapiens
LPPPSLARSPARRLLPLSLPLRMAATAAPPPLKMAKPRPPRLYSPRRHCLPGLVVRGSRAAKAS

SEQ ID NO: 33628 - protein, 69 aa, Homo sapiens
MWRRVERGRRGQMLWLGGHGGGGSLVLCSNPTSFRSGTLCVLCTLGPILPRRLSPSTCRKGGSESRRGR

SEQ ID NO: 33629 - protein, 148 aa, Homo sapiens
LACSLCVPALLCFSAPSVLCAGDTWAFPVPCSHLWSVGRQWRRERWEPGSAGLKVATAKRSAPPATPTRRMRIASAARVVAPQQTQSRRDTAAAPLRRDTAAAPLRPFELFPPYFSVSCYTAILLFICYFRQYPPALYHGHSVRIWFS

SEQ ID NO: 33630 - protein, 67 aa, Homo sapiens
MTTGARRKRTATSRRPRSLRTTRSMRWRRTRLIPIIWRSWKTTTTPVTAQKAASGAIVPTAALQLHS

SEQ ID NO: 33631 - protein, 67 aa, Homo sapiens
LITWALAASLGGLPGWVVQTSTPESPSPWSSRPPLALAAALVHSPSNMDERVQGDTLMDLLSAEWSQ

SEQ ID NO: 33632 - protein, 109 aa, Homo sapiens
LSRYLKIKKWAMEIFGERVLQAEGLVSAKAQAREHVSCWRSSEVASVAGMVRAREGMILASHPVTEDQEKSDPPKCPQLLKCPLSTFLVTDNGNTCFKNKMDLLNIWDH

SEQ ID NO: 33633 - protein, 107 aa, Homo sapiens
LMSLTSLITEGRAPKYMRFSMSTLVPLLEDPSIFYKGFLPILLRSGIPFGSSVPSASPSVVSIPCHNYRICNLRLRSSMICSLQAGYLPGLVGHKANDINSSSSLKA

SEQ ID NO: 33634 - protein, 114 aa, Homo sapiens
MINSFSSRIHVDSRNLRGAGQVQSRVQRWNSIPKAHPAPLSSAKSRNRVTPDELSGLEPRVQPPAPLCVPVPFLQVDRRHLLIGSVHIPPGAQRGPSPCLGTPSQADSRREEGR

SEQ ID NO: 33635 - protein, 7 aa, Homo sapiens
MLEPAVE

SEQ ID NO: 33636 - protein, 27 aa, Homo sapiens
MKREVVKTEQENKPRISPHQPPALPAT

SEQ ID NO: 33637 - protein, 85 aa, Homo sapiens
MLSLFPQLSLCAVAPFSSSNSRTLMISQNRSTSFFASGKNRFQLSPTNFASWLDISARLAGVILQKSSNSSGKIKCSLNHSSVLM

SEQ ID NO: 33638 - protein, 154 aa, Homo sapiens
MRVPRHPGGSHRSAVGLLCEKGPAAPSLVQIRCQTVFLGIHPNRSLISLCGSPGPPSRPEPKCLGSRERPVPFFSSLATSSHFRLLTVPKQPPKTLRELGPGPEAENGRKKRSGRFIKLSLQILQYRHCLLSSLWMVCTHPCLQVFRKNAQELF

SEQ ID NO: 33639 - protein, 284 aa, Homo sapiens
MLISVTGLKGVEAQNGSESEVFVENYETLVFYWPSLLCLAFLLGRFLHMFVKALRVHLGWELQVEEKSVLEVHQGEHVKQLLRIPRPQEKKKSWFQTRIYEWDPCFQFPSRMIGTIVLAFICLYLFIVIEFCVFVYVRDELDVLENNLESYITFTNHSGVLTPVILQVKELISVTKGVWVATILPAYLTCVSYLFHILVCYRKHMKRLWAGDKHFLPLKFHNPASSESMVAIARYSGWQIAYILWGYLIIHMVQSLCGMAIMYSLVLPIVQTRAWKCCKGWALG

SEQ ID NO: 33640 - protein, 13 aa, Homo sapiens
ITQLGPGSGGEDR

SEQ ID NO: 33641 - protein, 21 aa, Homo sapiens
LGMLLCLCIWSLFGATVDRHL

SEQ ID NO: 33642 - protein, 52 aa, Homo sapiens
VEALHLQPDHRRIPGAHRQELGFDLALLPSFLWVPGCTLLIHDVGYASDSQR

SEQ ID NO: 33643 - protein, 12 aa, Homo sapiens
LCGTFLLCLSSW

SEQ ID NO: 33644 - protein, 12 aa, Homo sapiens
MEATTQGHSEKG

SEQ ID NO: 33645 - protein, 19 aa, Homo sapiens
MNTWMKTSISWWLCMTTPL

SEQ ID NO: 33646 - protein, 31 aa, Homo sapiens
IHSRNPRQYSTEGEASTREISGTLILFRFFI

SEQ ID NO: 33647 - protein, 70 aa, Homo sapiens
RLALLIRHATKSWPVEHTSIFITQVSWKVVHFSFWEVMATKTEDPGSTNVNDGSLGRTTKTEVSIFYAWK

SEQ ID NO: 33648 - protein, 15 aa, Homo sapiens
VTGIKNRMHPLLQSH

SEQ ID NO: 33649 - protein, 34 aa, Homo sapiens
RTALMIITAGLLACPSHPMHPFCQIIRMREWKTS

SEQ ID NO: 33650 - protein, 27 aa, Homo sapiens
THLVSKEFILRRVCVCVCLFFLLNLFK

SEQ ID NO: 33651 - protein, 76 aa, Homo sapiens
KRGKVWRDPAPAPPPATTVGAAEEMDINPGVKSQGMKPAGAGNLGFRTLRRLLGCLTLTLSGRILNPSWVSSTGMP

SEQ ID NO: 33652 - protein, 51 aa, Homo sapiens
LALQITCLHFKNNLPETLPVTLALPPNGDGSNGGTNQEGEICGLNSLCLIL

SEQ ID NO: 33653 - protein, 47 aa, Homo sapiens
MLSLSLSLRAASPRSSRRAPARGMRSPRVPPRDQQAARTPSQRQTGT

SEQ ID NO: 33654 - protein, 111 aa, Homo sapiens
MSLKSATKWGRRCNYYYQHLESIMNLLEYFLALTSFILRCSYWIFPSANNMEVPIQGQIIPGFIWSCLKVKSLEFLMIPFLYGLQFDRWEFSTLKKYPQVTTDVLTPSMFR

SEQ ID NO: 33655 - protein, 18 aa, Homo sapiens
MCVCVRLCVFVCLCVLPQ

SEQ ID NO: 33656 - protein, 75 aa, Homo sapiens
ILQTTYSFSRHGTHLVLFGFFFGFVVVVSVWAWFCLFLETRSRSVAQGWSAVARSWLTEASTSRAQAILLPQPPG

SEQ ID NO: 33657 - protein, 7 aa, Homo sapiens
LIVLLFA

SEQ ID NO: 33658 - protein, 42 aa, Homo sapiens
MMGSRVLRTGKLLEAAGAGPGSPALAVFAFGRGQSLLFQVPA

SEQ ID NO: 33659 - protein, 44 aa, Homo sapiens
MFKLSPIGLLFMFVNIPGTNFNINNLKFYGSIQSCVKPESRDQT

SEQ ID NO: 33660 - protein, 53 aa, Homo sapiens
MLSPRLTRTWREDLGFSPVSINLKKWDLMEGRGGNAEDVLLSRCHNSSPVRLI

SEQ ID NO: 33661 - protein, 29 aa, Homo sapiens
MTFFEARFSKDILKVAFLISCLTGWRSSS

SEQ ID NO: 33662 - protein, 48 aa, Homo sapiens
MRGRARTSRLGALEKELELHSNSQASSCFCLCVKQIVTTHFETQAPGL

SEQ ID NO: 33663 - protein, 50 aa, Homo sapiens
MNISTNKKIISWYSMLNMETAQFSWRTVHLMSLDILSMIIQYLLMGSLFS

SEQ ID NO: 33664 - protein, 31 aa, Homo sapiens
IPYRRSLIIFLIYLQGSVCQMCATLLISHQR

SEQ ID NO: 33665 - protein, 38 aa, Homo sapiens
VVPRRRLPPSALISGAGTAFHSAPVVRSLRLPFRIFRL

SEQ ID NO: 33666 - protein, 40 aa, Homo sapiens
ISVSLLRLTKLLWFFSIVLYVPLLAVLLFNTVLYFFSKCT

SEQ ID NO: 33667 - protein, 20 aa, Homo sapiens
LSWRVTMKIILLSSGMPLLL

SEQ ID NO: 33668 - protein, 14 aa, Homo sapiens
LLLINIYMYLCTSS

SEQ ID NO: 33669 - protein, 15 aa, Homo sapiens
LVVLFIFCLFMTIQL

SEQ ID NO: 33670 - protein, 27 aa, Homo sapiens
MKLGIVGHLYYLGGSVLALSLKHLTKK

SEQ ID NO: 33671 - protein, 14 aa, Homo sapiens
IYLLYCANFSMYVM

SEQ ID NO: 33672 - protein, 54 aa, Homo sapiens
KFLWWQKAFSQRMEVAALLVFRTCWIRSLCVWPQPLETSYSAVSAHNSWSVLGV

SEQ ID NO: 33673 - protein, 36 aa, Homo sapiens
VKMCLLHFCKTLVFLSQVFCFFISKKMITLKMPSSL

SEQ ID NO: 33674 - protein, 7 aa, Homo sapiens
RVFMFLF

SEQ ID NO: 33675 - protein, 45 aa, Homo sapiens
IFLKKIRKHMVKFLKNSIQYVEVFKMLAPVSLIPAVSEFDGTCFL

SEQ ID NO: 33676 - protein, 32 aa, Homo sapiens
IGLVSKTNAIISLKKKEIGIQVNTTVPLNMPT

SEQ ID NO: 33677 - protein, 50 aa, Homo sapiens
MRKFTILKGSMLFSISLYLISDLKLLMQFMNLRKKNVNGNQMKKMRFRRN

SEQ ID NO: 33678 - protein, 38 aa, Homo sapiens
KQDGLPSASLERMNLHHLTSLFSSYLLFVCLFLFLQLK

SEQ ID NO: 33679 - protein, 10 aa, Homo sapiens
MWIQTFLSVL

SEQ ID NO: 33680 - protein, 39 aa, Homo sapiens
KVSWSLCDSGKKWREHSVSPTSFLTLLPYLSFFPTGLSR

SEQ ID NO: 33681 - protein, 33 aa, Homo sapiens
IMAIFFFFCIIVSSLPTAELGTENACSTCLLNE

SEQ ID NO: 33682 - protein, 20 aa, Homo sapiens
MKSQAHYCLVLMSLVLKILE

SEQ ID NO: 33683 - protein, 85 aa, Homo sapiens [sequence omitted]

SEQ ID NO: 33684 - protein, 36 aa, Homo sapiens
MVNQHHLSVSSLLTSPGLSVVYSINMFLAGLSGSCL

SEQ ID NO: 33685 - protein, 58 aa, Homo sapiens
MTLPIDQTKKYMFQSCVLLLCVSGIGGFLVSLTSRMKLRTLAVSVTVLKGSVSRVCSY

SEQ ID NO: 33686 - protein, 17 aa, Homo sapiens
VLGFQQLLLALPLAAFS

SEQ ID NO: 33687 - protein, 91 aa, Homo sapiens
LGADLFLTQLLLLVSSPPLFREEDHGQGWAKHQGLTQCFSHANVCENHMKTDSDLAGLERGLGFCFTLADSRPWRLYKWGQFGGNLMSKGN

SEQ ID NO: 33688 - protein, 47 aa, Homo sapiens
LGRRARWGRLRLATAFSPPGFAMFATAARSAIVMGMGGVEPPSPVSI

SEQ ID NO: 33689 - protein, 51 aa, Homo sapiens
MNSSRSETVFIHFYISNTWQSASAIKDNLPLKPSVGTEISARKASATRIIW

SEQ ID NO: 33690 - protein, 32 aa, Homo sapiens
MESRFCFLLLGVENIPARMSSKRRETASLERK

SEQ ID NO: 33691 - protein, 70 aa, Homo sapiens
MPPARPKRRPKARRRRRLWLKEAQALGTRVRALLLLALRGAGCVGVCTGDSGPGSSSDSVGQASQTPAAA

SEQ ID NO: 33692 - protein, 72 aa, Homo sapiens
MLMLMFIICIWTKRSSVLQDRTILKLFRNRNRSPSQTAKSKAPYIEASRLRAERDLGNHLVSLPHFPFRPQG

SEQ ID NO: 33693 - protein, 64 aa, Homo sapiens
VFTGQLLRAVIECGRLLTKMFAKSLLSPNSLLLAVSLCQLLLSIGEDCFSSPLNMGWACNLLDQ

SEQ ID NO: 33694 - protein, 50 aa, Homo sapiens
LAEFSHANWTIAALFLFCTNKTQNHSDDSIENKQAKNNVSMVPEIHFCFH

SEQ ID NO: 33695 - protein, 71 aa, Homo sapiens
LEHKKSFFNLFKNCCGFAATLRIVICIVRFWTYIVHVLMAERGGPGGPMLQSHLCPARDALLNEELEYFIG

SEQ ID NO: 33696 - protein, 189 aa, Homo sapiens
LAWEMGFEEFHLYLRPVHFEFASHGDRADQPPPVFITSLLEDSGRVDRYSPTALVLAISEVDDNQIGKFSFYTKEAILKLLLHSGVENMQVTLACQAAQKNALMAAVQQVYFYCTPQGSCPANVKVSLHDREARGISSPPPANVRLPLSSFLFSLLPFSLSFSPAPYFLFPISLSSLLSFFLPFLVSCL

SEQ ID NO: 33697 - protein, 21 aa, Homo sapiens
MKFVDTVMILILAMVSQVRCT

SEQ ID NO: 33698 - protein, 13 aa, Homo sapiens
MEKNEDSRHMIPL

SEQ ID NO: 33699 - protein, 59 aa, Homo sapiens
LRRCPRGARRMRTSPRRAAAVSGTARTPAPAAARAVPAPRERALPHLVPASRGSAGNAP

SEQ ID NO: 33700 - protein, 29 aa, Homo sapiens
MFLVGAWKSSSVFLFPQVSVLSYYNMADH

SEQ ID NO: 33701 - protein, 15 aa, Homo sapiens
LLCGMVGLILHPLFL

SEQ ID NO: 33702 - protein, 95 aa, Homo sapiens
MMSFGFGFLPKNCKWCLLALLRILPLLQISEKRLECSGAHASHCDTAGEPRATAVGMTALFLLKSDLSKPLSYVWRLLGSWSTQIATANLRNGHE

SEQ ID NO: 33703 - protein, 64 aa, Homo sapiens
LCAFVFLYFFSFFFFFFFCYLIIFLILDEVAGFCSTSLHEQAAPLRDFTAFKGHRTATMVKCLV

SEQ ID NO: 33704 - protein, 11 aa, Homo sapiens
MWLLPFAFYLD

SEQ ID NO: 33705 - protein, 90 aa, Homo sapiens
MDGINLWLSFNWRSQHMCFQEATRHSSLSAADFNVHFMHQSERIQCIRYFNALHHRNVKLVKGLIYGISIISLVGMLCQVMCLLSHFVVF

SEQ ID NO: 33706 - protein, 58 aa, Homo sapiens
VIRGWSFDLLLLIAFHVIMIIYSGSTPVTNNVTEMKQIQRKNIFKSFEKKCYSNLRHV

SEQ ID NO: 33707 - protein, 31 aa, Homo sapiens
MRLLNPGIRLLLDLLSLYCMSKATELDQENS

SEQ ID NO: 33708 - protein, 20 aa, Homo sapiens
VLGTMVLVIFLRANGVGTPA

SEQ ID NO: 33709 - protein, 44 aa, Homo sapiens
VPLRRSWGRGPAPRAFLRPAGGAGAALVAVVASAAASADRRHQR

SEQ ID NO: 33710 - protein, 27 aa, Homo sapiens
MCFSGLWFSFCASVCENGCVVSVNFVL

SEQ ID NO: 33711 - protein, 21 aa, Homo sapiens
LTPTPTTRLLCGTFLLCLSSW

SEQ ID NO: 33712 - protein, 50 aa, Homo sapiens
MWPRPPAPVTLQPSPLLPVVASRPSSQSDPESLNQPAAPSPVLQLPSPPG

SEQ ID NO: 33713 - protein, 33 aa, Homo sapiens
LVIYETLCGVKIGHAITLLFLVCLKRMTFTYKM

SEQ ID NO: 33714 - protein, 34 aa, Homo sapiens
LLHFRQCPVHAMVPRHLSSLWSLWLLSLAAPPVP

SEQ ID NO: 33715 - protein, 25 aa, Homo sapiens
MARGPSAPAAGALHAARARGQPRSW

SEQ ID NO: 33716 - protein, 72 aa, Homo sapiens
MLCSHAAREMHCRFCLCCWCALVPWWRSLPLLPVFGQNPNSLFLVRYCALPVLTEMCVCGLFFCKGEVCMFT

SEQ ID NO: 33717 - protein, 63 aa, Homo sapiens
MVYLPMHHFLNVSGFVFLPYPALFVNLSHFERTMRQPIVRRPCGTCPRARLWLSDNLFPAVHT

SEQ ID NO: 33718 - protein, 56 aa, Homo sapiens
VRMSRSPFLGHGCTWRVTFLNLLCTVLYCQCAVFVLLREKLCPRTLGRTKRQCTFV

SEQ ID NO: 33719 - protein, 56 aa, Homo sapiens
LSATLTAVSIWAAVEGFVALLPGQMPAGETDPTPAGVRWGGWPKLRHWQERRFRSH

SEQ ID NO: 33720 - protein, 83 aa, Homo sapiens [sequence omitted]

SEQ ID NO: 33721 - protein, 59 aa, Homo sapiens
VVTGSILLSLPITQHLPLKALPRPGLPPFKMSGSVQDLLLGHIALLGLVQVILPPQPPK

SEQ ID NO: 33722 - protein, 62 aa, Homo sapiens
MGLRSFSLPVLWCMPPSWLKNLHQPPLRLGSSLLSFTPRRSSVAPRALPALHPEFTLSPHLV

SEQ ID NO: 33723 - protein, 101 aa, Homo sapiens
VAMAETQSLGAPGIQRAQGPCCAALASAFEAPLGPCLCVCVCVCVCVYCMPTRVAGCWAVLLCGGAGTSATYVPLLRGPVGCRACLEEGFVCRRPLRGQFC

SEQ ID NO: 33724 - protein, 22 aa, Homo sapiens
MRCVGAFLFLLTTSSVLGVPVP

SEQ ID NO: 33725 - protein, 25 aa, Homo sapiens
LLYIIYIYIISLRLSLLVYPPGLGI

SEQ ID NO: 33726 - protein, 36 aa, Homo sapiens
LRPEPFCISPSSSLCRAMAVCTVAVFFCFFRTGFGG

SEQ ID NO: 33727 - protein, 14 aa, Homo sapiens
LIFISLGAFFLGKY

SEQ ID NO: 33728 - protein, 69 aa, Homo sapiens [sequence omitted]

SEQ ID NO: 33729 - protein, 61 aa, Homo sapiens
MKPGVAPSGSPGVSRRGPPAASLPRPQHASHSGCLGLLFFVSVICITLNAHDSSFKLEIAK

SEQ ID NO: 33730 - protein, 15 aa, Homo sapiens
MYPALCWNAEETGVK

SEQ ID NO: 33731 - protein, 82 aa, Homo sapiens
MKKREGRLVSSLIAGSATKRSCKPRREKHFNLGHLFAPGNGEWAVRPDFYPVQPAFISVFPHCYSGFGLCWKDNCLIQAAVQ

SEQ ID NO: 33732 - protein, 81 aa, Homo sapiens
MKKREGRLVSLIAGSATKRSCKPRREKHFNLGHLFAPGNGEWAVRPDFYPVQPAFISVFPHCYSGFGLCWKDNCLIQAAVQ

SEQ ID NO: 33733 - protein, 16 aa, Homo sapiens
MWSLHMLNIPALVMVT

SEQ ID NO: 33734 - protein, 11 aa, Homo sapiens
MFILSGYLWYS

SEQ ID NO: 33735 - protein, 33 aa, Homo sapiens
MFLLNLEGSFCSLSPSVAFSPVRCKASLVDRHC

SEQ ID NO: 33736 - protein, 39 aa, Homo sapiens
LLFAMYVLLLLVLWVPATFMSCNAHPEGVQLHFSSQQGY

SEQ ID NO: 33737 - protein, 24 aa, Homo sapiens
LKNSKPGLIGFFFSWVDLIIFYVF

SEQ ID NO: 33738 - protein, 20 aa, Homo sapiens
MFLFLFFSCMHSQEVVPISH

SEQ ID NO: 33739 - protein, 64 aa, Homo sapiens
LTKFTKRCILLTPLFNPLVACQCLCVYLDRHSFIVIQSIGRVYVSIFWQAYRCLRLMGKNQHEL

SEQ ID NO: 33740 - protein, 44 aa, Homo sapiens
LYTRTKTDKYPHHDVTHIAADFFREKCVLLLFETSVVVALYCNI

SEQ ID NO: 33741 - protein, 45 aa, Homo sapiens
LETGLGCFSVALGAWGSSVLWVCASSFSRSLLADCSDVPGWKTCL

SEQ ID NO: 33742 - protein, 56 aa, Homo sapiens
LGHSVALAGAGCLGAGLGRARRDGRVLSLAAAAAAEAAAAAGEAALRGQHQNWSVI

SEQ ID NO: 33743 - protein, 51 aa, Homo sapiens
LEKLEGGPLTPESVFPAFPIGPMMPFFLPLSSLGQSGPWGETAKLPGPSSK

SEQ ID NO: 33744 - protein, 82 aa, Homo sapiens
LASKKSCSVPCVLSFKGIFRINSDLEDSSVLQRLAFIFIVIMEMLSFILSYIRKKGVMQLISISLGNALVLFSSFLVPVTCL

SEQ ID NO: 33745 - protein, 45 aa, Homo sapiens
MYYIIIQKGSIHYTDYIVQSSAANSLRFIFFFFLSLWNRLCCSGG

SEQ ID NO: 33746 - protein, 13 aa, Homo sapiens
LSKMRKLICGLLF

SEQ ID NO: 33747 - protein, 88 aa, Homo sapiens
MRHQSIYVRCTSVSSGKMGQHEAGRGLPGDSSLFKMPRTWMTHSQDPPPVTYIGEPARRPLQETLHLFHLTSHLAASSTIEMNLTLII

SEQ ID NO: 33748 - protein, 57 aa, Homo sapiens
LDTPSVFLCLYGLLGFLPSQRALLQWCGLPGSLILADHGEHPGLPPLHPQGPLGPVP

SEQ ID NO: 33749 - protein, 58 aa, Homo sapiens
LNPAPSVFLCLYGLLGFLPSQRALLQWCGLPGSLILADHGEHPGLPPLHPQGPLGPVP

SEQ ID NO: 33750 - protein, 80 aa, Homo sapiens
MFFIKRTEDHVCWWALDSALSSNFAVSAVITAGNEKGKGLQLVSLCLWSTRGGHEASAGTALKAEFSGPCEGGKLACLGA

SEQ ID NO: 33751 - protein, 47 aa, Homo sapiens
LKPPVMFCKQVPLQNQRYLRGNLDARPALAAGLSFFTCKTGILELLN

SEQ ID NO: 33752 - protein, 19 aa, Homo sapiens
MATQVMKTVFEKMGKHRNI

SEQ ID NO: 33753 - protein, 56 aa, Homo sapiens
MTTFSYACLPFMSSVARGRTNSEDCTNTHRVTPLLWKLTQGERNSDFKQHLFVWPV

SEQ ID NO: 33754 - protein, 28 aa, Homo sapiens
MKCLQILFFSRMSTLESAGLFQVPRVIP

SEQ ID NO: 33755 - protein, 43 aa, Homo sapiens
MVPHRPFLCFFLVLFCFDCTVSFVVSSSCQNKREMNWTYVDKS

SEQ ID NO: 33756 - protein, 93 aa, Homo sapiens
MIEPGFESRQPGSRPCALNSRFASRTESYERLAQCLVLSRHSDSSIKEHCVHAEVHSTWSETACVRFLIPFITGCVISNKKTEEPAGRGSSRL

SEQ ID NO: 33757 - protein, 174 aa, Homo sapiens
MADEQRAGFSPCGSLSLTVLGGCFLSCCPWESDSRFFSLWPLGLSGLGGLTRSTRWASLVWGPGTWRSPAASVRPVLGVALKRQPVPQVSSLHTRLIACWFRPSAGFSLPLSNSHTAERAYGRDEAVHSKNILILRITSPPGITGVLKKCCDTSEHREIHGHFQIMEDSRRNFN

SEQ ID NO: 33758 - protein, 105 aa, Homo sapiens [sequence omitted]

SEQ ID NO: 33759 - protein, 61 aa, Homo sapiens [sequence omitted]

SEQ ID NO: 33760 - protein, 13 aa, Homo sapiens
LSWQGCPLLLLLA

SEQ ID NO: 33761 - protein, 25 aa, Homo sapiens
MTVWVAAFAVNHAQATQRHILGFWD

SEQ ID NO: 33762 - protein, 94 aa, Homo sapiens
LSVMMLGTCGQPVSCAASWAVARPSQPLARLTLAQAEAPFSWTMSSAVGKKVLCCSALISAGMPTTVTTARMPVSCASLHDPARSADHLFFWEL

SEQ ID NO: 33763 - protein, 45 aa, Homo sapiens
ISVAWRINPRIPSLALGASSLTSLCLLSQPSSSLTLQPCWLPPCS

SEQ ID NO: 33764 - protein, 62 aa, Homo sapiens
IQIMAKRIWSLKICLTWYIRLLSQSQVTEHAFPTIYLQMHSILTLLELKRQIGEEDKINICK

SEQ ID NO: 33765 - protein, 29 aa, Homo sapiens
MTTLFLFQLHVTAWKLLPSLISLLQVRMN

SEQ ID NO: 33766 - protein, 49 aa, Homo sapiens
MVLKRSTEAAPSPMWCPAPLALPLASCPLLVLFWHHLQQGRVWPLLQLG

SEQ ID NO: 33767 - protein, 39 aa, Homo sapiens
MKRRKGSFATTQEHAPNVAAQGSVLDPVVQDCLPRADRH

SEQ ID NO: 33768 - protein, 33 aa, Homo sapiens
MGLHLADLSCRSWDLTASIITNPPSRSLGASIP

SEQ ID NO: 33769 - protein, 10 aa, Homo sapiens
MECPRRLSRS

SEQ ID NO: 33770 - protein, 65 aa, Homo sapiens
MATYSAAFLPVVIGLDRQAAVLNPLGSRSGVRKLLGAAWGLSFLLAFPQVSDLGLRTGQDRDLGP

SEQ ID NO: 33771 - protein, 44 aa, Homo sapiens
MKPRTLAVSATAFKVAPLEFVPSDVRMCSEFLPSGGFVISLAQE

SEQ ID NO: 33772 - protein, 104 aa, Homo sapiens
MSVEPAPLTCIQLPLPPGPCSQMEVSPNTQIAVLLLLWEAPGLRQQDDELAELRTGCLETGTAAFIRRNSCSRVWWLTPVIPTLWEAEAGRSLEVRSSRPAWPT

SEQ ID NO: 33773 - protein, 44 aa, Homo sapiens [sequence omitted]

SEQ ID NO: 33774 - protein, 104 aa, Homo sapiens [sequence omitted]

SEQ ID NO: 33775 - protein, 80 aa, Homo sapiens
MVRRFHTLWRVSFLDNSGSCCVARAALELLGSNSPLASASQRAGITGASHPTVCSPEVEPERKMRDCLGATTSTMSPCTG

SEQ ID NO: 33776 - protein, 51 aa, Homo sapiens
MHALRKTGTANAEKVTGADLTWKRKHRLHEPPRLLRISLCGCTRRGHLQRI

SEQ ID NO: 33777 - protein, 38 aa, Homo sapiens
MAPPRAEGAERPSKYSLNPRRDSRQSGRPPKAASYVTA

SEQ ID NO: 33778 - protein, 63 aa, Homo sapiens
MCVLAFLTTPLLCISFFHFLFQAFLFLPCGNSFGASDCSSSECAAIPVDPVPGLQLLHLCQLS

SEQ ID NO: 33779 - protein, 51 aa, Homo sapiens
MSTAFCPIHSSLGSMVMCLCILSPLCIASKSLRVCTKSYMKAMGKPGCQWF

SEQ ID NO: 33780 - protein, 106 aa, Homo sapiens
MGGVLFTAFSQLKIVSCETRFVVCGSDLCVRLGLLRLLARPGALGSEAGAGRGGGEGLPATSLPPPDAWLGWRWNRAFGMLGDKGRKHHRKLADSKERKEEEVPLY

SEQ ID NO: 33781 - protein, 132 aa, Homo sapiens
MPRGTQRRPAQAACVRRCGAPWCGVALPLSLPTGRRAPCCQPEARRRLPPSRLRRLAVQGHHTASSSSPAPSGTPRGRATRATARAGIGELTRAEGARLGMLARVLLRRVLDTSDGSFRDPHQPRLTLDTGL

SEQ ID NO: 33782 - protein, 47 aa, Homo sapiens
MGGELLPLNKTLHSFSKPMGDPILQVQQGKNPDTESPLFLPQRRGPN

SEQ ID NO: 33783 - protein, 66 aa, Homo sapiens [sequence omitted]

SEQ ID NO: 33784 - protein, 38 aa, Homo sapiens
MSPEALVHMKLFLLFFRGRCRSWLMEWILHSDISWGCL

SEQ ID NO: 33785 - protein, 86 aa, Homo sapiens
MCLTEKVRVLDKLQSGMSYSAVGHELNVNESTIRYIKKKEKEIHRSVREAAPDSAEVTSIVRDEAMTKMEKMEKRLNLWIHEMSID

SEQ ID NO: 33786 - protein, 22 aa, Homo sapiens
MARLAVVGGDAGDCSWATVVEM

SEQ ID NO: 33787 - protein, 104 aa, Homo sapiens [sequence omitted]

SEQ ID NO: 33788 - protein, 211 aa, Homo sapiens [sequence omitted]

SEQ ID NO: 33789 - protein, 192 aa, Homo sapiens
MAPRLLHQALLGPGSRPVSPVAPRRPPAGARGRDAGRADRNETDSSGPAARKLPRLPRLPHARRARTLLFLRHLGRDWARPGLLGAHWRREVLVTAPSCPFMHARRPPASKEGAVCGIARPKTSRVNSSQDQIQVASENTHSGSLHQRPASGARLPASCGQELPLFSQRAVGGLEPRKQSEAHTPASFLPCS

SEQ ID NO: 33790 - protein, 34 aa, Homo sapiens
MPERRGSGAALIIWASPRRAWGNRETGGGLKASG

SEQ ID NO: 33791 - protein, 10 aa, Homo sapiens
MDKELRPQGC

SEQ ID NO: 33792 - protein, 27 aa, Homo sapiens
MPRDRGCLGPRRVPRCHLALTSRRSWL

SEQ ID NO: 33793 - protein, 119 aa, Homo sapiens
MTHDWCGAPGVSTGTAVGRIAVLCSCAQVPKPPFRCCSMSPFAFVVFFLFLRWSLTLSPRLECSGVISAHCKLRLPGSRHSPASASRVAGITGTRHHARLIFFCIFSRDRVSPCSPGWS

SEQ ID NO: 33794 - protein, 6 aa, Homo sapiens
MRETGD

SEQ ID NO: 33795 - protein, 48 aa, Homo sapiens
MEWTILSLSQLCHCSVKASIDGTQMHGCSCTPVQLQKADSWLGLAYGP

SEQ ID NO: 33796 - protein, 29 aa, Homo sapiens
MPPASKRVLCVDSLGNQRLEIPVKTLSRS

SEQ ID NO: 33797 - protein, 89 aa, Homo sapiens
MNFLTELSFGLLPFTLDVTCSSLPPAMIVRPPKPCGTMGVYLHKTLFLPATIHVRYDLLLLAFHHDCEACPDMWNSDISLLRYSLAQKG

SEQ ID NO: 33798 - protein, 79 aa, Homo sapiens [sequence omitted]

SEQ ID NO: 33799 - protein, 73 aa, Homo sapiens
MHECPHGEPPPPAAPALMITPIINWGMALCLVLALHGPRTLHRTQRVTLKNAVYLHLFLFDRRQLLVTLGTSK

SEQ ID NO: 33800 - protein, 29 aa, Homo sapiens
MCRGRSHEWQRQGRDCRDRLEPKHVALEP

SEQ ID NO: 33801 - protein, 35 aa, Homo sapiens
MCYLVSSFLIIWCLSKMRHRLVCRVEWERHFDLLA

SEQ ID NO: 33802 - protein, 45 aa, Homo sapiens
MRTRRCACCLRTSQQGWSVSSLRGPSFSSPSRPWRKSGSSPPTLI

SEQ ID NO: 33803 - protein, 50 aa, Homo sapiens
MLLKLSCNTHCCGPSLHSLKPVEPQTLQLIKTFDRKRLLISFLGACPGFL

SEQ ID NO: 33804 - protein, 206 aa, Homo sapiens
MADEQRAGFSPCGSLSLTVLGGCFLSCCPWESDSRFFSLWPLGLSGLGGLTRSTRWASLVWGPGTWRSPAASVRPVLGVALKRQPVPQVSSLHTRLIACWFRPSAGFSLPLSNSHTAERAYGRDEAVHSKNILILRITSPPGITGVLKKCCDTSEHREIHGHFQIMEDSRTKKTENTTHYPEIETEGVNNREKRGQRKGKQRRRGI

SEQ ID NO: 33805 - protein, 192 aa, Homo sapiens
MADEQRAGFSPCGSLSLTVLGGCFLSCCPWESDSRFFSLWPLGLSGLGGLTRSTRWASLVWGPGTWRSPAASVRPVLGVALKRQPVPQVSSLHTRLIACWFRPSAGFSLPLSNSHTAERAYGRDEAVHSKNILILRITSPPGITGVLKKCCDTSEHREIHGHFQIMEDSRVRRASFSALHCENLVGFLKMKP

SEQ ID NO: 33806 - protein, 117 aa, Homo sapiens
MADEQRAGFSPCGSLSLTVLGGCFLSCCPWESDSRFFSLWPLGLSGLGGLTRSTRWASLVWGPGTWRSPAASVRPVLGVALKRQPVPQKEHTGEMKQSTPRTFSSYGLRVPLGLQEC

SEQ ID NO: 33807 - protein, 69 aa, Homo sapiens [sequence omitted]

SEQ ID NO: 33808 - protein, 37 aa, Homo sapiens
MKGNKNSVENCWGQWHELSCKVMSVPWRDTRARTAWF

SEQ ID NO: 33809 - protein, 146 aa, Homo sapiens
MESEPLAGTKTRGRGRRRWEARHGWTLPAHASQPSPRTVVATATGAEVLARAGRSAGTRVAGPESQLSHLYGWDKYSNPRPSRRARAVARVHALEQAGVGLIGAIVQCREHTRTLRIVSCHKDPEQMDPAVMHKEDHARYDKDLHH

SEQ ID NO: 33810 - protein, 36 aa, Homo sapiens
MAPTSASGEGFMKLPPMTEGEELLPASCYKPEGKVY

SEQ ID NO: 33811 - protein, 51 aa, Homo sapiens
MRERKSWDPPRPSECDVLLRVSWGNFLYRRDVGGSDSVTSDKGVDSAAQNQ

SEQ ID NO: 33812 - protein, 66 aa, Homo sapiens
MQVQVTILFLATSCEKTNIWVTLVSTLVLLLVIVASAAIDHTRVVIQKLHIGKDFITSRTMQIDVD

SEQ ID NO: 33813 - protein, 38 aa, Homo sapiens
RLWWALIQLGYLRSIGHTLLETGKMANTCRLFCVTHWG

SEQ ID NO: 33814 - protein, 40 aa, Homo sapiens
VAPSVPTGRRLGFSRVQGSMDVDNGSGPWLAQEPGPDTRA

SEQ ID NO: 33815 - protein, 43 aa, Homo sapiens
MFFSWMVLMVVDVLQCLDIKILGMQHHMRGLKNKIKKEKRTQS

SEQ ID NO: 33816 - protein, 38 aa, Homo sapiens
LSKDRPRALRSWGSNSPWMAKQANIRHGSGCWKGGSRS

SEQ ID NO: 33817 - protein, 40 aa, Homo sapiens
IFVSALLMYPQQPELPDMSVIAALLIILPTADPFCETPGC

SEQ ID NO: 33818 - protein, 29 aa, Homo sapiens
VISTQSLSAKASLGSLIKLELWVQHFTWT

SEQ ID NO: 33819 - protein, 25 aa, Homo sapiens
METSKEARLLELLPPLLRDNIDYPG

SEQ ID NO: 33820 - protein, 42 aa, Homo sapiens
MSNYTILGQYCVFLVLCFLRSPTYWNFDYLDIFVFKRGGEFA

SEQ ID NO: 33821 - protein, 79 aa, Homo sapiens
MSAAAAAAAVDSGGWCIVLGTGGAEETSAISFCTVIFVLETPERKTGPDAPPGAIPPSPPPQPKAPVAPAFESELRKGG

SEQ ID NO: 33822 - protein, 63 aa, Homo sapiens
MQRGWGVGGWRRPLQSLGTCTSSWALFPSLSQDPWAWRFFTCDHPGAGPALGRQFPGKPLACV

SEQ ID NO: 33823 - protein, 65 aa, Homo sapiens
MVECVASRDRTTGGMFCASTVTLFPAWGLWERWRETGTEMVRQGESHKEEDREKEDKCIKRFRDV

SEQ ID NO: 33824 - protein, 98 aa, Homo sapiens
MTAFALSMLSAHHLLPLPLQWLTLETKTKTPQPFSSTSQISTDKDKGLNPQLLKMDPGHMGWSDTPAQLSAGEEAQKRFRGLKDILLPCPYEQAISAP

SEQ ID NO: 33825 - protein, 53 aa, Homo sapiens
MLQSNFFFGLILLSSHSPIVDPDSNFPPNFCKLSMISESPDLQHYYIHYSPCT

SEQ ID NO: 33826 - protein, 49 aa, Homo sapiens
MGFSVGEASIRQEGVPGCWLLVLFSFKSSVLLQRRRKKLVPWRCRNLWL

SEQ ID NO: 33827 - protein, 53 aa, Homo sapiens
MWNSIYQWVLPHFFLPGILHPSLLLLSCTGEQTCILDENKPTLETATQDIQKR

SEQ ID NO: 33828 - protein, 80 aa, Homo sapiens
MRALLPLLSAGATACVRDPWPDLSAPDNRKSLFRLKKKKKKKKSLWKTQQNPGSAELGEKSLAGAVSSLWFNGLLEARTG

SEQ ID NO: 33829 - protein, 82 aa, Homo sapiens
MRALLPLLSAGATACVRDPWPDLSAPDNRKSLFRLKKKKKKKKSLWKTQQNPGSAELGEKSLAGAVSSLWFNGLLEARTGIF

SEQ ID NO: 33830 - protein, 121 aa, Homo sapiens
MKRSNILAVMLFLISWMSTSISPLYPSLLVWISRYTTASSCSPSLGAGPAGTPRRSPSTVAAAPQRWPPPLTLRWHTSPYPPESPSTCCLYRQALGSWPLALCLQHCHLHVDWEPHSPRTC

SEQ ID NO: 33831 - protein, 109 aa, Homo sapiens
MQVQVTILFLATSWFPMAPVSRSSNNSGSSSDFKSSNNLKVFQIILSFQKIHIFQTIHVFRTIHVFQEAPSLPVNQVFQQIQSSSNYWSSTKSRSSRKIHVFQEIHVFQ

SEQ ID NO: 33832 - protein, 51 aa, Homo sapiens
VQEAATAAAAAAAAVAAAAAAAAAAAAAEAPVAAAASPATTTKKNPHQILT

SEQ ID NO: 33833 - protein, 51 aa, Homo sapiens
IQIERKRKKMSRRTSIRRNEENESFKLQSRSVLFRHKIISLILSPFAFASR

SEQ ID NO: 33834 - protein, 24 aa, Homo sapiens
IILRYPNVQIAFFIMNVLFFLVIV

SEQ ID NO: 33835 - protein, 38 aa, Homo sapiens
ITFPPLCSKKNHFSTSSVIMMKLVLTEWQLWIFNSNSQ

SEQ ID NO: 33836 - protein, 28 aa, Homo sapiens
IWDLGLLIFLTVNLLVVFVGTRGAENGE

SEQ ID NO: 33837 - protein, 47 aa, Homo sapiens
IQGSIGSSNKSGKTYYKFVAVIQLLIFSRGLTPLDSGWSWEDVNPVP

SEQ ID NO: 33838 - protein, 9 aa, Homo sapiens
IVYFKLICL

SEQ ID NO: 33839 - protein, 42 aa, Homo sapiens
MYTFRKLSPYLNKIVFVCSSVLGQSWGGFFSNLSETLSANTL

SEQ ID NO: 33840 - protein, 93 aa, Homo sapiens
MFTSDVPSNTAEAMSHACPRQGLPSPAARPPAGGAPRPGSSRVCPWPGSSGVGPSLQGGCVWPAFGAAGRRGGEWLGPAGRGFIRRFPSRAAR

SEQ ID NO: 33841 - protein, 39 aa, Homo sapiens
MGPIIMTSVQGTVCRNVIEIQVRASLPFSLQKQNQDNLS

SEQ ID NO: 33842 - protein, 34 aa, Homo sapiens
MLRYLRSIPSCWMLGPTSGQEGRAHPFLEETLTQ

SEQ ID NO: 33843 - protein, 36 aa, Homo sapiens
MTPSGFGWLWGRGPRGGLALSVVAASSLATMANAEI

SEQ ID NO: 33844 - protein, 173 aa, Homo sapiens
MIGTIVLAFICLYLFIVIEFCVFVYVRDELDVLENNLESYITFTNHSGVLTPVILQVKELISVTKGVWVATILPAYLTCVSYLFHILVCYRKHMKRLWAGDKHFLPLKFHNPASSESMVAIARYSGWQIAYILWGYLIIHMVQSLCGMAIMYSLVLPIVQTRAWKCCKGWALG

SEQ ID NO: 33845 - protein, 83 aa, Homo sapiens
KHYILALAALHCSSVLLVEIWILRREHSTALSSQENSRCKKLQCINCREESTVLQAERATTALLFNEREKMKERENFRRLGPI

SEQ ID NO: 33846 - protein, 42 aa, Homo sapiens
IMEYKKTTKAMKKRRMFYLHPISKPLLSCYCMSLQAQYRASS

SEQ ID NO: 33847 - protein, 75 aa, Homo sapiens
LLFLLLVLIFPSLLGLQPGLLRNWKGGKTNLAYSNCFSSCARHYGSFSSLGLSVNKFGKLDNRPFTEMTILYIAI

SEQ ID NO: 33848 - protein, 24 aa, Homo sapiens
MLESVFLSWCFLLFWVSSLPKCFI

SEQ ID NO: 33849 - protein, 39 aa, Homo sapiens
IRGLSKIAVFVLELQDFAFPSISVCQFSISCVCNVEIFW

SEQ ID NO: 33850 - protein, 14 aa, Homo sapiens
LLVSSVFFPLLSLC

SEQ ID NO: 33851 - protein, 30 aa, Homo sapiens
MKIFMMIHFHVINSKCFLFLVICLITFSFL

SEQ ID NO: 33852 - protein, 14 aa, Homo sapiens
ITRFIFALVSLAGG

SEQ ID NO: 33853 - protein, 74 aa, Homo sapiens
LLQWREIITDGGTRRPSFPHRLLSLEASSEDLVGLSFWVWAISVLMCVLFYHYCIMVFKPVGTQRTSLCNNNEE

SEQ ID NO: 33854 - protein, 9 aa, Homo sapiens
IKLTILFYY

SEQ ID NO: 33855 - protein, 81 aa, Homo sapiens
MIFSPSPRLCLFLVPCAHSCSLQSQPGLGIVNSFSFFSYCFLYSPLYFIPSLPYKWFSAQLALVTRGHRKYLLESLATCAF

SEQ ID NO: 33856 - protein, 34 aa, Homo sapiens
MSRILFCFITSTQIAINCYFVNYIFIEDIFSVFT

SEQ ID NO: 33857 - protein, 52 aa, Homo sapiens
LPKHSLSSRKQHGVYLKLPDMKRSLTVKFHFSSASSFTCSLSSALILACLNT

SEQ ID NO: 33858 - protein, 34 aa, Homo sapiens
MWRRSLWTFSRSGSLRRTGRIVLVARAQSGVAWS

SEQ ID NO: 33859 - protein, 107 aa, Homo sapiens
LFLCVCVCVCVCLSLFLSPSPAPPFQSPPGALIRLESGMVGKSRDLGFISSHTSPPAPVIHGGLPRAETEKKEAREFITQWLLPIAMPLLEVQPPFLLPGFIHLCPV

SEQ ID NO: 33860 - protein, 32 aa, Homo sapiens
LPLSDPPILTSFTWSLALVLIFSQFPTACFLL

SEQ ID NO: 33861 - protein, 36 aa, Homo sapiens
LPCHCAFLGGLAPVLGVGGWVSLSPHFLSSCSACLN

SEQ ID NO: 33862 - protein, 55 aa, Homo sapiens
MCQAAGSAQSPCLPPAGPSRRPSPASRAPGTILALSVAPASGAFCSLRIRLFFRA

SEQ ID NO: 33863 - protein, 152 aa, Homo sapiens
LQLPRAGKGKKSSPTKQIHKLGRSNLHRMCRSQWKDTGNVKKQGSGTPPKEPSNSPATDPHPKEIQEMSYRELWKLILTKIRGIQETSEKESKEMSTAILDMVEVFTNQIQSFPEHMANVELKKSLDEIQSILESFNDRLDQAEKKLSKLKI

SEQ ID NO: 33864 - protein, 13 aa, Homo sapiens
VKEFCCIILMIMG

SEQ ID NO: 33865 - protein, 32 aa, Homo sapiens
LGNRFQMNIYTWVKLLCASVVLLENVYGPTCI

SEQ ID NO: 33866 - protein, 69 aa, Homo sapiens
LRRSTDKLSRAHGLQRVQANLKLLMSILLMLPPGSNEAWAGCPKLLIFILALPQLSQQRIHWSSNQTRE

SEQ ID NO: 33867 - protein, 52 aa, Homo sapiens
MYRFRSQLFTGISAAATAHSYPRRFSTLLLAEDSPLSRPPHRRTSKKCSSIG

SEQ ID NO: 33868 - protein, 32 aa, Homo sapiens
MPCETAIRYIFSIIFKTILHTFNFITKFHFII

SEQ ID NO: 33869 - protein, 11 aa, Homo sapiens
MGRGIIIWCCL

SEQ ID NO: 33870 - protein, 36 aa, Homo sapiens
LGRTLLSFIAFYSVTACAWGKTKVISEQNAADSRIG

SEQ ID NO: 33871 - protein, 34 aa, Homo sapiens
LVENKKITFSVFISIMSLLSYFIYFWQSEFLKPI

SEQ ID NO: 33872 - protein, 37 aa, Homo sapiens
MCTLQLLCRFFVTFFSQVFQLCACSLESPVTTEILKV

SEQ ID NO: 33873 - protein, 25 aa, Homo sapiens
MKTIPSPFLLLSEGLEGSRASEEQL

SEQ ID NO: 33874 - protein, 93 aa, Homo sapiens
MMSVLSGAMWSATSRSARPSPAPMAGRRCPRLTAAVSDAKLPPSPACTRAVRWPLESAGLWTPAPAAPAWRAPCVARASAAHRSRVAPTRPLP

SEQ ID NO: 33875 - protein, 98 aa, Homo sapiens
LRTARALRGSATLHPERFGAGPRGIQPGTGGDPRTLRKLPPISLSSEPLAQHRPETPASKMKAIFCLWTEYPTKDLILKAMEHVYPHGSSGQTGGETV

SEQ ID NO: 33876 - protein, 15 aa, Homo sapiens
MPHFDPKHIPGFGHF

SEQ ID NO: 33877 - protein, 38 aa, Homo sapiens
MAQRTFLTSRATAVTKEYVAYCLRGWTPESLDSVIIFT

SEQ ID NO: 33878 - protein, 38 aa, Homo sapiens
MLHSKRVIPAGLSANVLSSQLFLLCTLPCFLSHVTCIS

SEQ ID NO: 33879 - protein, 45 aa, Homo sapiens
MKTFMMIHFHLMNSKDIFLIIFFRTFSLAYFIVNIQYIIHIQNTC

SEQ ID NO: 33880 - protein, 36 aa, Homo sapiens
MGRGAGRRAKWKGGAPKALYFPCVSLCLWFISGGCA

SEQ ID NO: 33881 - protein, 26 aa, Homo sapiens
MADSCLLSLYFPCVSLCLWFISGGCA

SEQ ID NO: 33882 - protein, 22 aa, Homo sapiens
MHLALYFPCVSLCLWFISGGCA

SEQ ID NO: 33883 - protein, 51 aa, Homo sapiens
LDCCLIFLTLSYFSPADEAAAEKMEAILVNGSHLSSWQRKKRKDPLVRNGD

SEQ ID NO: 33884 - protein, 58 aa, Homo sapiens
LTSFSCPIQAPVLAALLKLSLAPAPAPQPLAKPLLSFLLPPLSLQLRDGPGSSVSAVL

SEQ ID NO: 33885 - protein, 86 aa, Homo sapiens
MSGGWTSRKGSAGAGAGVRGLGPPTQAISPMLSSQQAERSEAPAPSSWEPAVHTPLTLPTSSFQVVDYRLSSGKLPPDLTGVQEAG

SEQ ID NO: 33886 - protein, 7 aa, Homo sapiens
MIICQGA

SEQ ID NO: 33887 - protein, 47 aa, Homo sapiens
MRTGFKGKWGHQKEAGWCEETSGKSPWRGPSFHWVTQKEKTAMALLI

SEQ ID NO: 33888 - protein, 126 aa, Homo sapiens
LNLSPNLGDSKPESGLTKDARMSGEVSWMQAVCAGTRAPATDEVAGVHRSLLRSSRGFQGRLTRFLGRRFMTAEFLLEDPSSGSLIPQESSWKTRACEGSAAAPRQPDSQPRTAGVDMHGSLDAIS

SEQ ID NO: 33889 - protein, 16 aa, Homo sapiens
MKPRVPTFIIQFQRHP

SEQ ID NO: 33890 - protein, 11 aa, Homo sapiens
MTSATLFVLAW

SEQ ID NO: 33891 - protein, 41 aa, Homo sapiens [sequence omitted]

SEQ ID NO: 33892 - protein, 69 aa, Homo sapiens
LATLVVWTLRRSPEDALRAAFALLSFCLSLLLGVDALRPRRCADGSLDRQDTEKAVGSKGSASGYSGGS

SEQ ID NO: 33893 - protein, 125 aa, Homo sapiens [sequence omitted]

SEQ ID NO: 33894 - protein, 82 aa, Homo sapiens
LTICRSGPDLPLVVRPIQLLLLLWLCEEVPSCCWLHIRKAVMGMKVKTWRFHFSHCFCLQDHPLKVEKLLCVVVNSKRQNSF

SEQ ID NO: 33895 - protein, 32 aa, Homo sapiens
LITVLLFGSLRPYLSTPSRVPVSEVIMLWSLH

SEQ ID NO: 33896 - protein, 38 aa, Homo sapiens
LPCVLLVSLCSLLLGCNSNFPTPCIPSFMLCKVLHFFL

SEQ ID NO: 33897 - protein, 106 aa, Homo sapiens
VVERDKRWSFSVVWFRDFIFNFMRQGLALSPRLECSGMIIAHCSLILLGSSNPPASAFQLAGTTGARHRAWLTFHFFCRDGVSFCCQSWSQTCGLKQSTCLGLPKC

SEQ ID NO: 33898 - protein, 124 aa, Homo sapiens
LLRSPPRSTSISRAARCCALAGASLLGPRIGPHHPGTTPFPGPSAFPPTRPSPTRGACSPRPGAFSPSGGTRSLAPARPSPRRSTESRRPMAQPTASAQKLVRPIRAVCRILQIPESDPSNLRP

SEQ ID NO: 33899 - protein, 130 aa, Homo sapiens
LRCCHPLLTLLLLSPSAFTPLLFRITPSTLQGPGGPRNQDPEGGALLTSHRGSAREELSPVEQNGNHLQRSPDPKQDGRQLLGGAKSPGILSLGLRALESKGKPPSLQGFSVCLGCCSGQGGSPTPSKQK

SEQ ID NO: 33900 - protein, 172 aa, Homo sapiens
LHFHPLPLPSGIPRVVPCTSGRHRVLLPPGLCLCWAFCAGRSASGLRRCQSGPRSLVPSTEAFLEDASRVSALSVFKIFLLFLIFLRQNLTLSPRLECNGTILAQCNLRLLGSSDSRASASGVAGIAGTRHHAWLIFVFLVETGFHHVGQAGLELLTSGDPPWPPKVLGLQA

SEQ ID NO: 33901 - protein, 52 aa, Homo sapiens
LQPPRESSARHQVTRPQPPGPQLRPASPRSGSCTLTLDSAAHGKNRIAPACN

SEQ ID NO: 33902 - protein, 65 aa, Homo sapiens
LHLDLVLLQKWPLWSCSETRPWAPLQPLSMTPSGFGWLWGRGPRGGLALSVVAASSLATMANAEI

SEQ ID NO: 33903 - protein, 32 aa, Homo sapiens
VACACTPATREDRLSPVKLQRAVRMPPHSGLG

SEQ ID NO: 33904 - protein, 32 aa, Homo sapiens
VMAAAICLVGINAIFSGGYCSLAVLQNWSMLA

SEQ ID NO: 33905 - protein, 56 aa, Homo sapiens
LLIWCLAWMPGLQALLVVALHSHPAEEDLLDWIFSGFLSDIVLYLPMKTLFFGLCK

SEQ ID NO: 33906 - protein, 26 aa, Homo sapiens
MLSWCCFLVAASPLRFHLELDVSYQI

SEQ ID NO: 33907 - protein, 14 aa, Homo sapiens
MVMVTQLECGSQAV

SEQ ID NO: 33908 - protein, 40 aa, Homo sapiens
MVSFPFHWLPAHMWKLFGKVPQNFGELCSPEVWRVRSERG

SEQ ID NO: 33909 - protein, 54 aa, Homo sapiens
MSCGGDGDFQLIPVTNSRPSYRVQVPSAWPGRTISLCLPLPLALTCLPLNMHFA

SEQ ID NO: 33910 - protein, 54 aa, Homo sapiens
MSGASSDRGLSCVSAARVLVGRACSSGARASRPDLGPRQGWKMMEEAEVEATEC

SEQ ID NO: 33911 - protein, 99 aa, Homo sapiens
MQHFAATLQASLLSGLQRLERDRDWKGTRTEQTGYKDSKQFHALCCYRGEQNAFSKDLKTLPSLQERIDADRRAWTDVMRTKENRWLEMTFIQGHFVRP

SEQ ID NO: 33912 - protein, 28 aa, Homo sapiens
LWINWNFLCCLSLCQFQYESSSNGKSLP

SEQ ID NO: 33913 - protein, 28 aa, Homo sapiens
MPGNSIWITAVAAQGDTQVAAFSDCIIF

SEQ ID NO: 33914 - protein, 56 aa, Homo sapiens
MMQISVFLPAAWLQLILAGEETSQLSQIGRKNMECVLPLTEHNQMNCPDSSLQTSS

SEQ ID NO: 33915 - protein, 29 aa, Homo sapiens
MMQISVFLPAAWLQLILAGVSSMSCKSRS

SEQ ID NO: 33916 - protein, 37 aa, Homo sapiens
MHRCSLGHGLCAGLSHGHHQYAYGFDDRHSLGISPHW

SEQ ID NO: 33917 - protein, 52 aa, Homo sapiens
LLSPKWEISQEETFRTSELLTCSHIVDMETTDLSNLVHLILHILTIFYFFIF

SEQ ID NO: 33918 - protein, 41 aa, Homo sapiens
MSTVKKMRGLLRSRLLSSLLLKAPLRLVSLFWRLCIRKLKI

SEQ ID NO: 33919 - protein, 42 aa, Homo sapiens
LIEFLWCSLACSSVFCISCSVMFKLRNALCGSSESHLWFSRH

SEQ ID NO: 33920 - protein, 73 aa, Homo sapiens
RVCPVLPSERSLCLRSLTILILSSCWMSFTQKINSTWFLNFCTKISRNSWMPLLSLAFLFPSSRAICSSCSRA

SEQ ID NO: 33921 - protein, 32 aa, Homo sapiens
VSHTQAAGWFPATYLRSLLLPWPRILTLLDNN

SEQ ID NO: 33922 - protein, 11 aa, Homo sapiens
LEATGQSRPQE

SEQ ID NO: 33923 - protein, 24 aa, Homo sapiens
MPPCAAPSPLSLASAWHSSTSSGS

SEQ ID NO: 33924 - protein, 109 aa, Homo sapiens
MSMASTPAATTWATRTCSWSGSASTTTRPLLTSTCLEPFWWTWNPEPWTVSAQGPLDISSGLTISSLVRVGPATTGPRVTTRRGRSWWIRSWMWCGRSVKTATACRASS

SEQ ID NO: 33925 - protein, 24 aa, Homo sapiens
VVSKGDWKKAEGMLASSCRHQVHS

SEQ ID NO: 33926 - protein, 34 aa, Homo sapiens
MSGLESARVLLCALGSFLLNSLLSTFRLNSSAPS

SEQ ID NO: 33927 - protein, 11 aa, Homo sapiens
MWSCSLPNVED

SEQ ID NO: 33928 - protein, 32 aa, Homo sapiens
LKTMMKSYIMIYLHLMNNSFPCKVIKVLPRRH

SEQ ID NO: 33929 - protein, 48 aa, Homo sapiens
LAGRATCRLRAGGTMSTRPPMRPPGNVPAVLLGFQPALALTGALCLQQ

SEQ ID NO: 33930 - protein, 106 aa, Homo sapiens
KMSPAMSDSGAPGGGQPDVFSSKSGLSSQQAATSDGQQVLLCAQIKNPPLRNSKPLRVLGQQGGERWRRNMGFLCSDCRDLGKDQPYTMSISCPLTWQGSKAQPRR

SEQ ID NO: 33931 - protein, 40 aa, Homo sapiens
IPILISNSSLPPSVRLMALLAGWIIELSGGTDAAAIPNKS

SEQ ID NO: 33932 - protein, 23 aa, Homo sapiens
ILPPPSQAGLMSVLTLLPLLPGP

SEQ ID NO: 33933 - protein, 52 aa, Homo sapiens
LVPVFAHLSILQSLVPAAGAASPVAISAQHLCYSHVTPGDPGAGAGQGPAPS

SEQ ID NO: 33934 - protein, 51 aa, Homo sapiens
LLPCDLQVLGRAQTAKMPGHSRRWERHLSNLTLLPGPSVQMGLCFIAGPSI

SEQ ID NO: 33935 - protein, 36 aa, Homo sapiens
MGMPERRGSGAALIIWASPRRAWGNRETGGGLKASG

SEQ ID NO: 33936 - protein, 54 aa, Homo sapiens
MAMFLAGCGGPLLNDLLPCCSEDTAARKGLAHCGASQGTLVAPASDLVLSLVWG

SEQ ID NO: 33937 - protein, 65 aa, Homo sapiens
MSHALALLASTWAPTARPPQSFTQAIADCRCMLEMGHRAGHDMSCLDIGGGFPGMEGSGPKFEEG

SEQ ID NO: 33938 - protein, 109 aa, Homo sapiens
MLPALEHQTPSSSVLRLGLALLAPQACRQPIVGPCDHVLAPLTNECLSSQKINNESSRQRGRKMDLARDGEERTQKDEVVQIGSWIGGRTKGEAAEVDVKDGEKWTAET

SEQ ID NO: 33939 - protein, 14 aa, Homo sapiens
MMGEKKRSHLCIPP

SEQ ID NO: 33940 - protein, 57 aa, Homo sapiens
MRNMGNYSLKKEMGFHHVAPAGLELMSSSDSPASASQSAGITSVSHHSCLYTSKGVE

SEQ ID NO: 33941 - protein, 8 aa, Homo sapiens
MLGDKDPT

SEQ ID NO: 33942 - protein, 23 aa, Homo sapiens
MPGPHARDSDGLGMGWSLKAGLF

SEQ ID NO: 33943 - protein, 61 aa, Homo sapiens [sequence omitted]

SEQ ID NO: 33944 - protein, 17 aa, Homo sapiens
MPPFGTTPLEFKETKTL

SEQ ID NO: 33945 - protein, 26 aa, Homo sapiens
MAPPRPPRSGNAGILLDKDVVIEVTG

SEQ ID NO: 33946 - protein, 60 aa, Homo sapiens
MQRDLLPTATKDCDSPDYQAGRVHFQLTSELREPFSTCLVSAITSVPQVVTFSVRSPFTD

SEQ ID NO: 33947 - protein, 109 aa, Homo sapiens
MKGTTWLQKSPLASASPGVSLSAQAGQRRHHNHRHPSNHSERPFAHAWSLLRPQYFSLRPARLARRGAFSLSAYFKTTPLLHARCPSLSPRCLPRPGTEAKFAPKPTVL

SEQ ID NO: 33948 - protein, 60 aa, Homo sapiens
MTYCRGSLLIHALKSAQGQGLPCSISVWPLLYQPEASRTLWSLPRVTDNLPPPPAAQGSA

SEQ ID NO: 33949 - protein, 23 aa, Homo sapiens
MVTGASPRERPHARAQEDRNGEC

SEQ ID NO: 33950 - protein, 27 aa, Homo sapiens
MVFIAASALAEVPRAGSQGARVSQEHH

SEQ ID NO: 33951 - protein, 23 aa, Homo sapiens
MPRKDEDDRHYFGVLPTTAITER

SEQ ID NO: 33952 - protein, 113 aa, Homo sapiens [sequence omitted]

SEQ ID NO: 33953 - protein, 58 aa, Homo sapiens
MTPTCLLISIVHWRGAREEGQRHMRSYYSLIPPLHLAEGMRTKEDRNQEKAKLLSLFQ

SEQ ID NO: 33954 - protein, 29 aa, Homo sapiens
MQQLLGVTGFLWVLCEEYAFIPVSGRGEE

SEQ ID NO: 33955 - protein, 26 aa, Homo sapiens
MAYYSHTALSGSSNSVCSRQKCSVYL

SEQ ID NO: 33956 - protein, 52 aa, Homo sapiens
METSCSLWVSSELFCRSVKVFFCLLALHLSALPHSSWTQDKNLGLAGMVELK

SEQ ID NO: 33957 - protein, 64 aa, Homo sapiens
MTCQRPSLRSNCAAAGALSAAAAARAPRAPFGTHRSPPPAAPLSRSRAAAAVSPRRLGDAGHGR

SEQ ID NO: 33958 - protein, 104 aa, Homo sapiens
MAPQKLFLSPPDSGFGGWRARDAKGQWKIFYSTRNQARRWRFHCHLGVWGGGEPHLSGQSAPTRTCCWEPHTKGETPSTWPLDPQGVNLLGFCLSRFPLTLLTQ

SEQ ID NO: 33959 - protein, 105 aa, Homo sapiens
MRCEGGFPDGEKQMVPEWLGDRCNISVGGGHGAERSGLSGGSPVATVQDLGRRDRHGQDAGDTAWGIQHTGHHPAGKQSCSLRSPSTNSWHGQKVSQKHQKVPGS

SEQ ID NO: 33960 - protein, 42 aa, Homo sapiens
MFFNQSYTKCPCLSCLPSHFLHVFLSATLRQQDQPLLLSHST

SEQ ID NO: 33961 - protein, 30 aa, Homo sapiens
MLATPPGASLRLLLTVVTPLYLVSRGCLRC

SEQ ID NO: 33962 - protein, 59 aa, Homo sapiens [sequence omitted]

SEQ ID NO: 33963 - protein, 21 aa, Homo sapiens
MSIMTRVCPPPVPRSIPASIP

SEQ ID NO: 33964 - protein, 36 aa, Homo sapiens
MSSQQPRLEPTPWCWQRKPSLKGNCLKMLQKHEKCS

SEQ ID NO: 33965 - protein, 53 aa, Homo sapiens
MRGESSLGAEAAGCSVPGVMADEAACERVRGGPVMLKQCLPRPWRWVTSEAES

SEQ ID NO: 33966 - protein, 89 aa, Homo sapiens
MTHGCPEARIFSLPRVAPARPTRGPSWCGRGSWQGPGARVETWQWGWVWCPHRRVCREHSWMWQPQSQEERQDASSHAETDPGKKPAHV

SEQ ID NO: 33967 - protein, 34 aa, Homo sapiens
MGSGGRAGQPPGGRAGAGYLLTWEGPGSRSMEVK

SEQ ID NO: 33968 - protein, 17 aa, Homo sapiens
MLSPVHPINLGDKPGAG

SEQ ID NO: 33969 - protein, 35 aa, Homo sapiens
MVEKTPDHHLDHSYSCKGRGNPSLDPPQPCKTCST

SEQ ID NO: 33970 - protein, 4 aa, Homo sapiens
MRGC

SEQ ID NO: 33971 - protein, 43 aa, Homo sapiens [sequence omitted]

SEQ ID NO: 33972 - protein, 85 aa, Homo sapiens
MVLGCLKTGRQVNGGKRRANLVIHWVCGGGLPGWVVQTSTPESPSPWSSRPPLALAAALVHSPSNMDERVQGDTLMDLLSAEWSQ

SEQ ID NO: 33973 - protein, 13 aa, Homo sapiens
MSAELWGHPSPGP

SEQ ID NO: 33974 - protein, 42 aa, Homo sapiens
MLTILTRIEEGGKMCVSLSWKFNQADFMGFFHTRRQYQKKWM

SEQ ID NO: 33975 - protein, 22 aa, Homo sapiens
MESRRCGFSCCFFFFFSEALSE

SEQ ID NO: 33976 - protein, 6 aa, Homo sapiens
MGPGGR

SEQ ID NO: 33977 - protein, 20 aa, Homo sapiens
MREEEEGRGQREKRLSGRKV

SEQ ID NO: 33978 - protein, 52 aa, Homo sapiens
MFSRQWLLFPVGSPTASLAWVFSAVPLDTSSEKHMNSSESPVPLGKFPIATH

SEQ ID NO: 33979 - protein, 37 aa, Homo sapiens
MEGLSTAGGETDVIYNHTIHGRSQVYNIQSSHIASAQ

SEQ ID NO: 33980 - protein, 90 aa, Homo sapiens
MEKQEPLRMDYGACSRKAGKRCGGAAAGVSKAGTGGVLTPCPSSRGPRTGGRGLLQAGRRSPAEQQGSWPAEGAMLCGTAGKSQTRIYER

SEQ ID NO: 33981 - protein, 6 aa, Homo sapiens
MAGPRG

SEQ ID NO: 33982 - protein, 111 aa, Homo sapiens
MKNTRAIILRTLLGLSPCSCLQDPLAFLSLAKGGGLCGLTTHTAAPVGLIQSVEFFKREKLKSLRRKEFCLQTVFELKTVASTPAGISSLLASSADSHLPASTIAAEAEEP

SEQ ID NO: 33983 - protein, 34 aa, Homo sapiens
MLNLLSTLIFHFTFIRTTAVIAPAILCRNDLKTD

SEQ ID NO: 33984 - protein, 47 aa, Homo sapiens
MGNQPSSACTPLECILNHWDSVDPQTVEKEEKTFSLLCPLFQPGMTM

SEQ ID NO: 33985 - protein, 66 aa, Homo sapiens
MGTSSPPQPDGGQGLSKSQGNAQSFLTSGLRTLSISLISNLICGKSKEHLLLKIEVFWAGCGGSFL

SEQ ID NO: 33986 - protein, 18 aa, Homo sapiens
MRILRGPYAALFAAVLTS

SEQ ID NO: 33987 - protein, 45 aa, Homo sapiens
MSWFSFNGGDSICVCALLEDLPLYQMKLGKDNVPKSIQAQKGISV

SEQ ID NO: 33988 - protein, 26 aa, Homo sapiens
MVFLTWLSCISLTLTKLVQHLPWATC

SEQ ID NO: 33989 - protein, 36 aa, Homo sapiens
MEVLFDSLLFSSFIFPSQSLLSRTSAFSHKPNGLSE

SEQ ID NO: 33990 - protein, 161 aa, Homo sapiens
MSSHLPFYVTCARWLLCLQTSHLHSRQKGEGKSKRCVPNKSILKTNKGRGSRRKFKKKKKKNKNRKAVVSLKAPSSRLLPVTHYPVMWPPLDSRQSEEVSVSKRHMDATDKIKFPWLKEKRTIEFGEAAGYVCHRRYKDMEPHEKMGEAAKKVHWVQVRSR

SEQ ID NO: 33991 - protein, 55 aa, Homo sapiens
MVFPAKPEAPSLLPLFSLVSFSGWPEDETPQTPHFLALVPGLAGPGIHLHCVGCP

SEQ ID NO: 33992 - protein, 30 aa, Homo sapiens
LPSFVVSQRCAGLLLAALRIQGVGCQVQVS

SEQ ID NO: 33993 - protein, 32 aa, Homo sapiens
RQRFLGFCLVLSLQKVLPVPPALGTRLCIASP

SEQ ID NO: 33994 - protein, 41 aa, Homo sapiens
RIPEPLLRVSAGSGVAVLLLSLQQEVPIFLLANNRISRSLW

SEQ ID NO: 33995 - protein, 25 aa, Homo sapiens
MIFGCTTELFQKHLGVPMISTSKEC

SEQ ID NO: 33996 - protein, 13 aa, Homo sapiens
IDKLGMLGICFTF

SEQ ID NO: 33997 - protein, 14 aa, Homo sapiens
VTVIFSFFLPLESF

SEQ ID NO: 33998 - protein, 33 aa, Homo sapiens
LAFLLSLISLFQRRPNLKSFPGSGSVHLIRQPK

SEQ ID NO: 33999 - protein, 18 aa, Homo sapiens
ICSRRRLLLLPLLLPLPP

SEQ ID NO: 34000 - protein, 45 aa, Homo sapiens
MRNSSMRVTASRPPSTIFSPSCLSTSLSSSRKLPTLTSCSSSFCS

SEQ ID NO: 34001 - protein, 93 aa, Homo sapiens
KGSGRRTANREALGSWLGQQLHLSCLCSSGHLLMLRGSPPFQRLVPLSWNLAWAYAEAASTPLSQGLGGSIAPTPAAFAHGWPCPPLAQPKSH

SEQ ID NO: 34002 - protein, 20 aa, Homo sapiens
LATLLLLLLLLLLQLPLHSR

SEQ ID NO: 34003 - protein, 16 aa, Homo sapiens
KCLARNTVGTSMILLL

SEQ ID NO: 34004 - protein, 53 aa, Homo sapiens
LALQVHFHSSLRPLPWGVMFCYRDPRYQIAPGLIWGLGICHSAVQTLIFFSSF

SEQ ID NO: 34005 - protein, 42 aa, Homo sapiens
MWPTLMQLWIFRMRSSPRCAQVLMNNLVNWLVEKKLLSLLQI

SEQ ID NO: 34006 - protein, 38 aa, Homo sapiens
ISFISGLCPLGWKGQDSAAAFAFLFLNFIVLISFLPNR

SEQ ID NO: 34007 - protein, 33 aa, Homo sapiens
MAHRSLGLLGSSDLSTSASSIAGTTGTHHHPQG

SEQ ID NO: 34008 - protein, 45 aa, Homo sapiens
MTLPIDQTKKYMFQSCVLLLCVSGIGGFLVSLTSRMKLRTLADRV

SEQ ID NO: 34009 - protein, 31 aa, Homo sapiens
MLESVFLSWCFLLFWVSSLPKSISSKRRFNN

SEQ ID NO: 34010 - protein, 305 aa, Homo sapiens
MHNIIVKELIVTFFLGITVVQMLISVTGLKGVEAQNGSESEVFVENYETLVFYWPSLLCLAFLLGRFLHMFVKALRVHLGWELQVEEKSVLEVHQGEHVKQLLRIPRPQEKKKSWFQTRIYEWDPCFQFPSRMIGTIVLAFICLYLFIVIEFCVFVYVRDELDVLENNLESYITFTNHSGVLTPVILQVKELISVTKGVWVATILPAYLTCVSYLFHILVCYRKHMKRLWAGDKHFLPLKFHNPASSESMVAIARYSGWQIAYILWGYLIIHMVQSLCGMAIMYSLVLPIVQTRAWKCCKGWALG

SEQ ID NO: 34011 - protein, 20 aa, Homo sapiens
MLTKQIFTSAKLKLCILLLT

SEQ ID NO: 34012 - protein, 26 aa, Homo sapiens
MAKIPNLLFCFISPLGVVRRSSPCYP

SEQ ID NO: 34013 - protein, 22 aa, Homo sapiens
RALTAILWKPPSSLAQASVVAP

SEQ ID NO: 34014 - protein, 21 aa, Homo sapiens
KTVNLKAFLIGLLMKTVYSVA

SEQ ID NO: 34015 - protein, 110 aa, Homo sapiens
LRLGLSLILRSARERSSAAAGRKQFCKNNHTQPGNCLPLGLSLSRRPHSLQGGGHRIYRGKTSLPASRLQCCKLRISLDFVFPGNCSKTQNHICREPDCHGIRGAGHSYL

SEQ ID NO: 34016 - protein, 62 aa, Homo sapiens
LAGWLSAALRCAPAAPAARGWGCPAEPRDPPPSARTRTDKLILKVAVVLLLSKNGGPTGESG

SEQ ID NO: 34017 - protein, 58 aa, Homo sapiens
LLEPPSFGTQGFRELPFLAARDLPEQSSPGSPARGARRRAGLLSGLSWLVYALCLISG

SEQ ID NO: 34018 - protein, 43 aa, Homo sapiens
LCFQPPRQLLHPSVIARAWGKTRRQERLTSSGFPRLIPEDKAR

SEQ ID NO: 34019 - protein, 63 aa, Homo sapiens
VDFCFVILTLAVSPPARRRAWLLVAIRKQQPFHLSFLHSGICSRAKGGRVLKEGLMSSSFSNS

SEQ ID NO: 34020 - protein, 69 aa, Homo sapiens
VDFCFVILTLAVSPPARRRAWLLVAIRKQQPFHLSFLHSGICSRAKGGRVLKEGLMSSSFSNSCKLCVG

SEQ ID NO: 34021 - protein, 102 aa, Homo sapiens
LMPSKTEDPFCITELWIICGSLVISHLHSLLQSLNTYLGSSLPYLVKDGIQPDLYWSNLGFAVFSLCCHLLRGVLYALLALGITAGQACVLRYLPEVLISCA

SEQ ID NO: 34022 - protein, 52 aa, Homo sapiens
MRYLTGFLYNCFLPPSKLTAREKFSCLIYLKPNGLQWIIHLLGIFLLLFKAK

SEQ ID NO: 34023 - protein, 62 aa, Homo sapiens
LPLSALLLLGLRGPGPRQQRPWGLGPLCRPRPPAAPGTRPGARSWGSRDVYLSKRDHSSCSR

SEQ ID NO: 34024 - protein, 47 aa, Homo sapiens
MSVAIFLPFSVPLRRKNLTENTKKKKKKKKKKSSYHCLFCELFVLVC

SEQ ID NO: 34025 - protein, 43 aa, Homo sapiens
VVAVFSAAVTVIVFASLAKTSALDQDGGWTAFLTFTGPGGADA

SEQ ID NO: 34026 - protein, 66 aa, Homo sapiens
VAYTQSFPPFLIGFLQALPTPALCRAWEVNQLGGFLEKKSADLRETALFVKYKIHLVGVRDAFVDG

SEQ ID NO: 34027 - protein, 41 aa, Homo sapiens
LTLSQCQVSKCLLNDHRRLVLVVGVWGSVLVIWMLVIGVQY

SEQ ID NO: 34028 - protein, 50 aa, Homo sapiens
LRARRAVLTAPRTLVSSLFSPRPSLGRAGTLAFPVPHGAAPTPDGSFSHT

SEQ ID NO: 34029 - protein, 43 aa, Homo sapiens
LRGAGGGAGWGQRWLRLLALGSACGRALAQSRLIAAVAPGATG

SEQ ID NO: 34030 - protein, 58 aa, Homo sapiens
MKEIIAKRRRIWKKLNYIQLRKFHVLNLMMMIMIRILFHLLQKKLFLLLLPLQNALVR

SEQ ID NO: 34031 - protein, 134 aa, Homo sapiens
VTGRLGAALLNCVQFCYTVHCPLLGVCMYEHTCLSERFLGVCPLALISPIPVPTLPEFFYPRSCQPHWESVCSNGLSCLCRGDLELCTCHYWGGVPALASTMRRPLYLSSQSLLFLKHYYLFFRCLPAAVLLST

SEQ ID NO: 34032 - protein, 101 aa, Homo sapiens
LQGGLGDCSPARPSPGFWARASLAVGAGAVGGTLLNWEIASDLQTPNISAHPALGFKRDPSPRLALPCENVGASCFHHRLPHHLCSLAVHCHRRQCLVGRR

SEQ ID NO: 34033 - protein, 124 aa, Homo sapiens
LSFLTPSQSCGKGHSLSLSFLSCQPLRACSSGSESQWERARFAKPWAPGLGAPLPDPSGHGRGEPRGEEPRGGARARGRRQAALAPSRDALSFFLLFLLLPLFASPANAVGAARRSGAARDRAT

SEQ ID NO: 34034 - protein, 29 aa, Homo sapiens
MLKYPTIICGFLLSMLSFLVLHVFLKLYY

SEQ ID NO: 34035 - protein, 47 aa, Homo sapiens
VTWTRKWSSSRHRWELGARLGVRPAGGGGLASAATEGSGVVVWVGGR

SEQ ID NO: 34036 - protein, 30 aa, Homo sapiens
MEALRASTACGLSAAAVCGMSTIQHGGGGR

SEQ ID NO: 34037 - protein, 38 aa, Homo sapiens
LNLSCRFLICHTCASSEDSFFVVVFFCFFFFGRCMTCV

SEQ ID NO: 34038 - protein, 68 aa, Homo sapiens
LCSHMFSLSLSLSLSLSLSLSLSQAGHHSVISSNKTSQVPKTFNSKRNPPSPRQKRRSHRPDGVEWTL

SEQ ID NO: 34039 - protein, 43 aa, Homo sapiens
MQVGSQPVCSLSAPPRPAPVTALLLYHLCLTLSGFSIEWLMCM

SEQ ID NO: 34040 - protein, 106 aa, Homo sapiens
MPLQCLPGVAMAAAGSPAAPRFPLASPSCSRYIPPAPASPTTPLASRMGRVPAVAVAPHRRTPTPSIATHAPGETARWASPLAAQPPVPYPQPHSPARPPGPSQSL

SEQ ID NO: 34041 - protein, 68 aa, Homo sapiens
LARTRPLARSGSARLPGRGRRRNSLGPETPRLFCGPAPGRCRRTLEKEEEDLSDSTGDGSLPLFIVAS

SEQ ID NO: 34042 - protein, 42 aa, Homo sapiens
LARLPGSRALAGWVLGPGAPAPALTARLCAAGAAQPCCAACW

SEQ ID NO: 34043 - protein, 88 aa, Homo sapiens
VSWALSVLGRAGAMAPVLAALAHVLCPYMAPGLCREPIRLLIAILEPPGAMAVRRLPSAFGAVLAIKNFLERQSAKEGTGDSERQMFW

SEQ ID NO: 34044 - protein, 14 aa, Homo sapiens
LSFSQCTLLLLYYL

SEQ ID NO: 34045 - protein, 54 aa, Homo sapiens
MTVTVVLGLMFFCLAVLWAEVVKRPSSQRALMNAVSSSCSPHPITNRLQFFGFF

SEQ ID NO: 34046 - protein, 58 aa, Homo sapiens
VPSRREKGRSLCGVCCVHICFVPHTCSSCLGAYQVPSPVLGAGSTAVSKGDNIPCSQR

SEQ ID NO: 34047 - protein, 35 aa, Homo sapiens [sequence omitted]

SEQ ID NO: 34048 - protein, 9 aa, Homo sapiens
LLLVLSLWG

SEQ ID NO: 34049 - protein, 28 aa, Homo sapiens
LDHSGKLCWLGVGFCLPWGTLLSVDHTS

SEQ ID NO: 34050 - protein, 118 aa, Homo sapiens
LGAARRRRRRVAAREAREAVAEAQAVAAAAQEAADGELREQARPGSLAAAWLQHARPPGAAAAAAPLAARRALLLFSLVLAAVLRLCGARHSEHLPLHDASPRHSDPGQRENNRCSGL

SEQ ID NO: 34051 - protein, 30 aa, Homo sapiens
LQQENFHLALLALILTGHQTRGTEGREDAR

SEQ ID NO: 34052 - protein, 113 aa, Homo sapiens
VLLACSSSPPALPLRDLPTPCSPRPHLLQHPGIPAPPARAAPAGSGTCCARREEGKLQTPAWKTGCRGCTTSRRRRRRNYFAIPHSAGALPLPLLLPPIRVRGFEHRSGGDAL

SEQ ID NO: 34053 - protein, 56 aa, Homo sapiens
LSPQEDAAFKVLSWKQRLCPHQMLNLLSTLIFHFTFIRTTAVIAPAILCRNDLKTD

SEQ ID NO: 34054 - protein, 53 aa, Homo sapiens
LEDAAFKVLSWKQRLCPHQMLNLLSTLIFHFTFIRTTAVIAPAILCRNDLKTD

SEQ ID NO: 34055 - protein, 39 aa, Homo sapiens [sequence omitted]

SEQ ID NO: 34056 - protein, 138 aa, Homo sapiens
LPLLALPARSRLLGCLWLGSAILSPTLGHCSASLPAGCPRSAPGPGEPSGRASLVVVEALAIINDRGYNDFAVSAGSHHALLLAETRDAFPAVHQLGSMELLLPHRRGEDHREVQPGRREDGEGQGSRDHAERSTRGA

SEQ ID NO: 34057 - protein, 13 aa, Homo sapiens
LVSRLVLIVLNFQ

SEQ ID NO: 34058 - protein, 28 aa, Homo sapiens
MEPKSRSYASPLLYSQTCRTLVTREMMG

SEQ ID NO: 34059 - protein, 33 aa, Homo sapiens
MRAARALGGAPGASRAACTGGLALLRPGRAWWI

SEQ ID NO: 34060 - protein, 31 aa, Homo sapiens
LWSPACSPSAPLVLLHALVLHLNFTSILSFS

SEQ ID NO: 34061 - protein, 52 aa, Homo sapiens
MLRAGDPQDKTKEPEPHPLIGFAWGGGVLSPLIFSSGRDGPKASPAIIRNDS

SEQ ID NO: 34062 - protein, 46 aa, Homo sapiens
LQGSGNRSGNANRSAARRLGCRLSAAALGWCAVVRPRLTAASATQM

SEQ ID NO: 34063 - protein, 44 aa, Homo sapiens
LFLSLLLSLSLSLSFFSALAGAVLEERKKERQRIAFIRYVLEIS

SEQ ID NO: 34064 - protein, 86 aa, Homo sapiens
LGCAWLLLVGALSRRPAWGGGGVDSSPASPWRGGLHSLLRPPPLGPQRLGPASCFPACRRSRWLEEVFTSQESQSVSGPRWEKNWL

SEQ ID NO: 34065 - protein, 97 aa, Homo sapiens
VRPAPPSLPASRGYCPPWRRLDLSEARSDRPREDSHAGLRIPHSGAAAPHLSAALLLFLLVNFCHSAMKSIQASLISTLRARSAELIRRAVVPRARG

SEQ ID NO: 34066 - protein, 66 aa, Homo sapiens
LLLNLVKEVTYTERVVRAVLSGCLGCWLLSSPFLTHLYIILRWCSQSLKGERIKKKSRKRFTLLFL

SEQ ID NO: 34067 - protein, 78 aa, Homo sapiens
LPGGERWPCANAARQHPSAGKLQYLSDLWEVVQPGHRFHLPLAEEDHGQDDSEHAGAGRGRYRGGDQHDQHSLAERCL

SEQ ID NO: 34068 - protein, 173 aa, Homo sapiens
LNSWPGAGDPEWMRYTQALPWVTLVPLASLGGAALPGRFLGGPNPGSRGLRAGHAGRPRLCLAAPLPGPGGGGLSGCPGPRRPLPAVPQHLQEQGQLLPVPRPALLPEDPGAPRGAGSARPPAPLRAAPAAAPALAAGAVAGSAQSAGGPGKEDVLHRHAERLLPRRPHLREV

SEQ ID NO: 34069 - protein, 29 aa, Homo sapiens
MRKERTPGTPGWALLLPSGFRGPSPWQCL

SEQ ID NO: 34070 - protein, 128 aa, Homo sapiens
MYMCVCVYIHTYTYIRACVCVYIYMCIYIFFEESHSVTQAGVQRRDLGSPQPPPPWFKQFSCLRLPSSWDDRHVPPHPTNFIYLVETGFLRVGQAVLKLLTSGDLPASTSQSAGMTGMSHCAQPPIFL

SEQ ID NO: 34071 - protein, 77 aa, Homo sapiens
VRARRCGFFSGLRRALLLVPALAGTRFLFASFPSARRRPAAKTRWAAPPIEITEDIRVLLKRKRGHLRTLLSASKDY

SEQ ID NO: 34072 - protein, 71 aa, Homo sapiens
VRARRCGFFSGLRRALLLVPALAGTRFLFASFPSARRRPAAKTRWAAPPIEITEDIRVLLKRKRGHFSFLS

SEQ ID NO: 34073 - protein, 88 aa, Homo sapiens [sequence omitted]

SEQ ID NO: 34074 - protein, 53 aa, Homo sapiens
MQTVLGPLNSMTGMPTPSWLLGPVFLLSTLSGLGWDNRGRSGSCPLSLGICNP

SEQ ID NO: 34075 - protein, 9 aa, Homo sapiens
MYLLMFLCY

SEQ ID NO: 34076 - protein, 117 aa, Homo sapiens
VSVPFHFHFCSLACVLPSARGKTYPEDFFRRGWGGAAGEPWPKRTMLGTVCVPSAAGHQKATWVPGALPLAVGPPPPLSGFPRNVQPRRPSQSLGRVMSAGPDRRPLGTLCCFVSFL

SEQ ID NO: 34077 - protein, 61 aa, Homo sapiens
LPGLGPCHLLPQVSAIHQKGSLRVWARDLLLLALLHGPAMLSKPLFAAFSSSSSPDSINKT

SEQ ID NO: 34078 - protein, 44 aa, Homo sapiens
LRLACGLLGSLASCPCLSVCLSVSVLVCCPPSWHAIVEGLARCI

SEQ ID NO: 34079 - protein, 96 aa, Homo sapiens [sequence omitted]

SEQ ID NO: 34080 - protein, 38 aa, Homo sapiens
MYLNVYSLTWIKHEQARGVLCRWLLVLVIIGCMMGQGR

SEQ ID NO: 34081 - protein, 50 aa, Homo sapiens
LANFFVFLVEMWFLHVGQAGLKILTSSHLLALTSQSAGPAEICFLRYFVS

SEQ ID NO: 34082 - protein, 54 aa, Homo sapiens
LPLPRPPIPHFWAVMLLVCPLHWGWLGWKVGWTSAAFLPPMAAAPLALTVLGRG

SEQ ID NO: 34083 - protein, 69 aa, Homo sapiens
VMCVLAFLTTPLLCISFFHFLFQAFLFLPCGNSFGASDCSSSECAAIPVDPVPGACSKFSSVRPFAGLV

SEQ ID NO: 34084 - protein, 30 aa, Homo sapiens
LAFLTTPLLCISFFQACSKFSSVRPFAGLV

SEQ ID NO: 34085 - protein, 46 aa, Homo sapiens [sequence omitted]

SEQ ID NO: 34086 - protein, 41 aa, Homo sapiens
VSSRPSKGLDRLFSLLLPVGLFLKRMAELPTCSNTIRTKVA

SEQ ID NO: 34087 - protein, 37 aa, Homo sapiens
MEFCSCCPGWSAMARSQLTTTSAFFFLLFLKLVVKSR

SEQ ID NO: 34088 - protein, 56 aa, Homo sapiens
LREEEEEEEAAGGGAGGGGGDQEVQLGARELHPRGGGCFFFLSFFFLFLFFFFSNS

SEQ ID NO: 34089 - protein, 114 aa, Homo sapiens
MIVRLPQARGTGRSRKRAVLHNKRKNCLNGGVSGMSHRPGVEEESVKQGTGTSWDVGSSRSPARRTSHFLSRTPASLESDAPTVWPRQPDVSHHTGRRSCYRKTSDFASSRWLF

SEQ ID NO: 34090 - protein, 52 aa, Homo sapiens
MLSAPCLFISSGHAQPCCSAWRRCHACSLSVSQPRRAIHCDVGRPGWTPSAE

SEQ ID NO: 34091 - protein, 101 aa, Homo sapiens
LRRYLKLSLLLLPLLPSALGLTQRAPNPTTQVSSLSVVPCFCSKLLSQHPGVWNQQRQSPPCLETLFGSTGWPGARPERGCMAFAKSLAFGEGSARVSWAE

SEQ ID NO: 34092 - protein, 34 aa, Homo sapiens; identical to SEQ ID NO: 33926

SEQ ID NO: 34093 - protein, 31 aa, Homo sapiens
MLEAGTCATMACLAVVGGDVGDCSLATVVET

SEQ ID NO: 34094 - protein, 103 aa, Homo sapiens
LLPRKRAGTAPAPPPPAQRAVAAAAAAAAAAAAAAAAGTTARGEGHALSERERALRRNSAPAVRPPQRRPREPRPPSFGHRDPGDTWARNLNGGFPGLTPFIL

SEQ ID NO: 34095 - protein, 29 aa, Homo sapiens
MEIDLENKVSTRCFVVSVFLLFTLPESVL

SEQ ID NO: 34096 - protein, 76 aa, Homo sapiens
MGREWSIPVLVVQVGISEEIAVIPRLGPPGGAAFPSASPHTTHPAAVIPLTELFFILTLIPGGLKAKTAQRGKIES

SEQ ID NO: 34097 - protein, 59 aa, Homo sapiens
LVSGFESSGVPGRCVTLGQSPNLSGLELPHNNTNTSAARSAGGTMRAMRPAQVPGTQLM

SEQ ID NO: 34098 - protein, 108 aa, Homo sapiens
LRATRSIFSFHMKNLSPGVICAAKDTQQVSGCTRNSTHCLRQSLPQSTLSPPQGLVLNHSVVSCLLFFFFFWRQGLSLWPRLKCSGVITAHVAWTSQAQAILLPLPPK

SEQ ID NO: 34099 - protein, 232 aa, Homo sapiens
VSPFAPPAPSASLPQTQTLPREASQRRGQKAATQSRHIPRLGRRHSPQTPWTPAVYEDARGTAWFRERAPKATCRPPAPGRAPSACRNTPLHPARDAELRENLVQRGLNARAPPRGWSLSRPHPPGDHRAASPAARRQKLEKKKKKKKKSSWGLGTRLLAPLNSPRLSPPSPPVMNPVKGDRPGSPRNIYSCDSHKMEKGLNFCFFKELVFCVCVYTASSHQPNCLAPLQLR

SEQ ID NO: 34100 - protein, 250 aa, Homo sapiens
LGLRPLHQLLSTLASGPGAGGPWAPAHWPACPPLPGLPRLQLPPPHHAQPCPDGVRLPDPGQCQGHPQAPEAAGVAGSGEVAPGGGPVATAAGARPERLSGPQVPCLPSFAPAVLLPRMPMPWLPGPPGPAAGPLRRGCRGTAFPLPWTARCPGLRPQIPLPQRRGAVTPTPASPKPPWGPFRPPYSIFQTPGDHRPSQWLQGLPQRSPKMDTQPQRQQEKHMGIFFLYFNLIPLKCLFFIVFFIIYIIY

SEQ ID NO: 34101 - protein, 61 aa, Homo sapiens
LRARNPGRSASGKRGAVAGAAHVSNSLLLFAHIPNFLTSIPAGRHGVFGRQQQDDGRPGRR

SEQ ID NO: 34102 - protein, 37 aa, Homo sapiens
LGRNSSVHCCCCCFWCFAFQCQLSTLYMIRFIHITLL

SEQ ID NO: 34103 - protein, 27 aa, Homo sapiens
MGWTFCFSFNSLFSFSFLLNLQHLASR

SEQ ID NO: 34104 - protein, 71 aa, Homo sapiens
MTTDSLLMKRRPKAQVRPSRNSSAMAPSAQDLGVGRQGSQSTRRRGRPQPRPPLQPTTGALGWAWALSAKP

SEQ ID NO: 34105 - protein, 46 aa, Homo sapiens
MLNHLTQSGSNSHAFGKGTSVLCGSVSRPNFPFGTDAVVHACNPNT

SEQ ID NO: 34106 - protein, 15 aa, Homo sapiens
VMAAGALCVVLLLGR

SEQ ID NO: 34107 - protein, 36 aa, Homo sapiens
LLEGSNQPAPLALLLVCAAFQRLPISLVIYFYICFL

SEQ ID NO: 34108 - protein, 53 aa, Homo sapiens
LLSLITLLSFLPPQANPNISLQCVDFYPVNTVISLNDVQADETRSLGSLLHFL

SEQ ID NO: 34109 - protein, 255 aa, Homo sapiens
LGTQSGNTRMDQLVCRIAHQEDQKPVALLICPQDSGGAPALPPPTCQFPDPPIRDHLDQLPQVLHLPSLQAEHQGHASPASRLLHAPVTGVGRAGSQWSCGPVPLLDAAALTHEVRGALQGYLQVRGFTSGHKPPEAFCHLPERQPGRLRTQPRGEIPVGPEPQDLRTTQPYHRTVQDCPCHLCCLSQTLVFSKAPVSTSCMPLCKATHHCSCRSLWTWGWMGLKMLHVNIGLVRFLAFYLVTGCFLFWGGGIGL

SEQ ID NO: 34110 - protein, 113 aa, Homo sapiens
MKLLAKVTQHSHILLNIILFSGWNVTIAQVGIFVCFVHCCTPSPQHSACPGQVPSKHLGSNASVLPAAPANRPPTQALPSASTATTAAHLCWHRSLFPGLPEIPSPHSARGSY

SEQ ID NO: 34111 - protein, 30 aa, Homo sapiens
LGAEGSLGLWAAAAAHSALAALCGDRRPQT

SEQ ID NO: 34112 - protein, 109 aa, Homo sapiens
MLSRGWLLLVQVLPPTPRISARLCHGGQRPPRTKGPCLGVRVRAEGAGASRISLNTSWLGPRRLKNTGLGWSWHLLTRKGIAEIQPLQPPSVHRWLTFSPTICFLLLKG

SEQ ID NO: 34113 - protein, 54 aa, Homo sapiens
LSGLLCVLGTLLCATADPVVHQPPDPHLCLLIQCGHQLGLCQQLPQPLCVHRAL

SEQ ID NO: 34114 - protein, 116 aa, Homo sapiens
VGPSPTSRFFLLPSCCFGLATPSPLVPLEACPALILPMPSTARRLAPISTLGRGQVGQGWTSRRGVRLCSLPPASTERSHGFRYLPPVLFLLQPQFHQVSGLHGGLGQAEESGQGP

SEQ ID NO: 34115 - protein, 50 aa, Homo sapiens
MCTSGSRPASYLYSICIPQMERFGEALFHTFVKVYMLAQSLVSVPLSLVL

SEQ ID NO: 34116 - protein, 27 aa, Homo sapiens
MSRISPQSKCCVVCLHFVTAGPSILEL

SEQ ID NO: 34117 - protein, 27 aa, Homo sapiens
MYVLSIMCLILLLSHPEAPSFVWTAKN

SEQ ID NO: 34118 - protein, 76 aa, Homo sapiens
MHKKGSPILGSHTARVAGTSPPALPLLAQLPDASAEPHGPRHALRRPQQSPAPAGGAAAPAPGGRQPARSRSVRGH

SEQ ID NO: 34119 - protein, 54 aa, Homo sapiens
LAPAFGESGVWRLVVVISSDCFAVHGFSFCPVGLSAVCASLCPPPLPPAHLCLR

SEQ ID NO: 34120 - protein, 144 aa, Homo sapiens
LAGLLLVFPLLVALLGLGLVWEQTCFISTLPSTSGAVASTARGGRGAHPAQEQRSGGEETASLLTGPLCVTKFGKNMDLSQSFHVCSQLPAEKAKGSLPGKETGRKIKEFGELDLKCELKIKIKPGHIPVSKAKPTLSRGRLSI

SEQ ID NO: 34121 - protein, 34 aa, Homo sapiens
LICFISLVNFYMEKTKMILTELCVIVPFIFLVPI

SEQ ID NO: 34122 - protein, 73 aa, Homo sapiens
LRSLLRSPSLPLSLSLLHALQPFKMLPLPCDSPDAAPRPPARSPAPSLARFLSLALPLPTPICYTETPVNGLH

SEQ ID NO: 34123 - protein, 22 aa, Homo sapiens
VCVCVCVCVCVCVCVSLCLCIG

SEQ ID NO: 34124 - protein, 124 aa, Homo sapiens
LRAGSPAPGRERGGRHRHRPGVRRRSCGRAGGHQLGQGLLGAALCGAAAARRGAGFSQAPRGRVANGAAAGAERDRFAVAVAAACVPGAGGSAASLAAHRAPRFPLSRAGGFSEFSGGETDWSG

SEQ ID NO: 34125 - protein, 19 aa, Homo sapiens
LTCLAPAALSCFLPIVLAP

SEQ ID NO: 34126 - protein, 27 aa, Homo sapiens
LELNFPTAMLRNSTLHVFVLFFGVFFN

SEQ ID NO: 34127 - protein, 85 aa, Homo sapiens
LILVPDGAFGAGRNTQRTNDRTFSAPFLAPVWFALSPSTMTALFGCLSPGQLLLSFRCLFANNHFLFCVPFKRQIKSTSVFLENS

SEQ ID NO: 34128 - protein, 64 aa, Homo sapiens
MVYDWMNGFLYMGLCECMCVCDFFFKFMLRKGNHKVMMNCKHPKDVRVFLCIMFYTLFNWLHYP

SEQ ID NO: 34129 - protein, 26 aa, Homo sapiens
LTLSTLEFRVAIECQLWRWGAYQIYK

SEQ ID NO: 34130 - protein, 35 aa, Homo sapiens
LAALILVRARLLLLGWVCIIPITPSGKRSQPPFKP

SEQ ID NO: 34131 - protein, 14 aa, Homo sapiens
VIFLIFLLPKIVHH

SEQ ID NO: 34132 - protein, 38 aa, Homo sapiens
LRPAGRFYSAAGSLALLGYMQQATPQASSNNFLVQSCL

SEQ ID NO: 34133 - protein, 91 aa, Homo sapiens
VGEKSHQDAPPPLRSPPSPSWTGVSQLVAVVTASAWNSSLGPWEEYCLTQDVLGVLFRAFIYGLVSFLFHGCVFAFVSVGAPLPSSGGLRA

SEQ ID NO: 34134 - protein, 34 aa, Homo sapiens
VSSSPALTPWFLPWLPLVSTLAQPTPVCPSPSCF

SEQ ID NO: 34135 - protein, 25 aa, Homo sapiens
LFCLLFVVCFFATNFSIHSALLDKS

SEQ ID NO: 34136 - protein, 42 aa, Homo sapiens
LTCQSVGITGMSHRARLETSLSLFSSSIPRLLLKWLALQWFS

SEQ ID NO: 34137 - protein, 41 aa, Homo sapiens
MFVCVCVCVCVCVCVWACIYRLWYTCVSGHVDTCVLVGMSG

SEQ ID NO: 34138 - protein, 16 aa, Homo sapiens
LCYLTLLLLVMLQTGK

SEQ ID NO: 34139 - protein, 83 aa, Homo sapiens
LGRPCFSPDGPREGYQRPWCCHLPLLKCLPGAPGAVLANAGNIHFPAASWVLLSYLCLFSGGLGTISGDLGCADSKDPLWQEP

SEQ ID NO: 34140 - protein, 36 aa, Homo sapiens
MFLPCSSRPAARHAVGAIATVASCRASGTLGHVWSN

SEQ ID NO: 34141 - protein, 91 aa, Homo sapiens
LASFFADGSPSSQISLPVHQLFLPHLSPLLHPPVPAAKAWAFPPSLLSRCRAGTPYGLVSPPQSLAYPSESLILFLLLLLLLLLLLLSLKL

SEQ ID NO: 34142 - protein, 65 aa, Homo sapiens
LLYLAGAWNVNSHWGTGTEDQHPQANTPSVHTKKLHIFFISIEIKTKPIFVTLLCYLLYLLYGSI

SEQ ID NO: 34143 - protein, 137 aa, Homo sapiens
LAWVNSSVTLALLGGDARPLAWVNSSVTLALLGGNAHPLPWVNSSVTLALLGGDARPLAWVNSWMTSALLGECAVPALPPPTSGAEARPGHPSAWTPLEGEGASLSRWAPLALPSLSLHTGVGWRRPQASYCKSFLF

SEQ ID NO: 34144 - protein, 77 aa, Homo sapiens
MGMRLGGRILSSLPPHSGVWLQPSLAPAGGREGAGSPSGLQGQVQGSPRMGFPGGGGWGGVLFLVPRGGAAPSHFIQ

SEQ ID NO: 34145 - protein, 86 aa, Homo sapiens
VVPVPAGTGLGLVRPWGLRLVFLCLDLHIYCIAGRDPQACPPCQDSSGSVWVPHSAPISPMSPAGAGSHPSLLAAAPSRPGIGSAR

SEQ ID NO: 34146 - protein, 35 aa, Homo sapiens
LTHVYLFSGGISAGDFRAPVEVAMLTPSPLRGTEG

SEQ ID NO: 34147 - protein, 63 aa, Homo sapiens
LDGDLVGERKLRTLLPWGRKLRWGWLSPPQHSPCSPPMSLLCLSLSCSSPSCLFMFLSTINEC

SEQ ID NO: 34148 - protein, 36 aa, Homo sapiens
VTETQSIPKWAVTEVVDHTVKLKCEGKAGTYWKLKI

SEQ ID NO: 34149 - protein, 24 aa, Homo sapiens
LCLLLIASLWVEERVIWCRIGGPM

SEQ ID NO: 34150 - protein, 72 aa, Homo sapiens
LWLALVRSVVFFPGVFLLISFLPGPSGARDRHHLPERGCPRCQALGSRLSGWPGGRRGDVGGPDVCLERPRS

SEQ ID NO: 34151 - protein, 212 aa, Homo sapiens
LRGSRGRQRGQRRRTCPTWRRGLGRLCASAPASPASAFSPPASLLPSREPPPLGPPPVLPAAAGPGARPSLPAAPRAGRVAEPRLPDGTGPARLGAPPGPRRGHGRTGPGAAAASAGPVAPARRPGAGPRALHAAPPGGRGHEPRSCAHPGTRDPCRAPRRRLGARPGACPGVPRGRRQLLGHGRQPAGGLWPRLLPGDADRDPPAEATDSR

SEQ ID NO: 34152 - protein, 74 aa, Homo sapiens
LLFWFVVVFLFSFVFLFSFFLFFFFFFFFCTSPTQDSGAPPGQFHFRAPMHLPKAASLGRGWFEETLLKKKGRH

SEQ ID NO: 34153 - protein, 75 aa, Homo sapiens
LQAGAKPAGKANHALISEVPGGGLSSVSFSPTLSKSVALTFLLDRPGIGSWRGFASAQKALCFRFSFLFFFLFFF

SEQ ID NO: 34154 - protein, 25 aa, Homo sapiens
LRPRFLTKLVLLRVFLHDLTAVDSR

SEQ ID NO: 34155 - protein, 60 aa, Homo sapiens
VIFFFSRKANGWRGSTTRFHSSNLCLALFLYLATRDQHAVMCAEGGIGQLHNLDLTTVWI

SEQ ID NO: 34156 - protein, 62 aa, Homo sapiens
LFSLCLQCGFLPQCCRLSECYQSVRDHCLVGWRSRTCSHGSGSNHKTVIYLPNLFLSVASPA

SEQ ID NO: 34157 - protein, 180 aa, Homo sapiens
MTTTSYMCLLQIVRAGSAGCWPLKKKRGIITVWCLNIILISGWMGSGGAVLSWRSLQQAVPNMIQPRMLQRSLFLLLLKTTGDHFGNLKKLWSLPYMTTKPMILRNSHCGATKSTACWTVLRFTGGESRTGMGMKDMYQAVIWWKNLQIIWKPMSGTIRVSAETKLKNFFWTQAKKEPSW

SEQ ID NO: 34158 - protein, 120 aa, Homo sapiens
MKGGILPPFLCLCLVLLSLFPSDHFGNLKKLWSLPYMTTKPMILRNSHCGATKSTACWTVLRFTGGESRTGMGMKDMYQAVIWWKNLQIIWKPMSGTIRVSAETKLKNFFWTQAKKEPSW

SEQ ID NO: 34159 - protein, 51 aa, Homo sapiens
MLVSLRAASWSLHHCSSLISKPSAAFKIRSLCSHPVKFVNNLIKWHQHFNQ

SEQ ID NO: 34160 - protein, 76 aa, Homo sapiens
LGLLGPGRVFWMGLGCSLVAGPPRSGPACWGFEEVECRVEVLFTRVLGTVPGTLRQAPRPAGPAGGARCVCTFQSS

SEQ ID NO: 34161 - protein, 73 aa, Homo sapiens
VRREGDTRVQAGISGQLMRGQQEHWPIAPGTPCRGHPRSSLGFHFHQGLKSAVASESSVFLLLFTAQLMGVIP

SEQ ID NO: 34162 - protein, 63 aa, Homo sapiens
LLWGICLFSLFFLTSISMYVQRLKNNLERVHPSNSSSLEISASLRLRLYSTSSDYTTTINLLL

SEQ ID NO: 34163 - protein, 26 aa, Homo sapiens
MPLSNPPVCTLQILPFGPAVATAWPL

SEQ ID NO: 34164 - protein, 59 aa, Homo sapiens
LENKVTFSAQQPSCLIVLGSGACVGTASLLVLISDHLVPGRDKAGLRRFFSVLDTGLSS

SEQ ID NO: 34165 - protein, 109 aa, Homo sapiens
MRSKPVSASSTWRSTLTISTSPGQSAPAWWMAKSCALVNTRQSCATGGRKCGSTSMLGNKHRSPLPLLVLCTLEPSPWLGCPPLTCPRSTQACLAAQSLGCLLSRALTV

SEQ ID NO: 34166 - protein, 37 aa, Homo sapiens
LWHFASGLPSLLVTLLPLVVTDSWEDPPCPSLRFSKT

SEQ ID NO: 34167 - protein, 109 aa, Homo sapiens
LLLMPVLREDTELHLFWDLLWGRMVDSGILETCLGPPRVKATQHSRRAPEVWKLRRVIGITPTVDRGRQGVRINCLRVGESEMWGPYSAPRPGTVFLSSFLSPASEEHL

SEQ ID NO: 34168 - protein, 102 aa, Homo sapiens
LSVRPALCVLGPYLSMLLAGGPARCLLHTHHLREAPAGRRPVLPAAALHCPLHAHLPGPPGGLAALCVSRLSLLVPTAVGPPALHLFTAGRQGPGRWGSPAQ

SEQ ID NO: 34169 - protein, 106 aa, Homo sapiens
LGLGMWYRLLAAAGSRAVARPLALLWRCGGPGGGRTAKTSARALGKARQWLWPVRMCGVALQKKLGKLIWPPVPVLPGDPRSEADSAGKTDVIFLVAVFKTTQRDW

SEQ ID NO: 34170 - protein, 201 aa, Homo sapiens
VPPQRPSAALCPSLGPAPALAAPLPNETGRDDQEDVPERLGAEYPGQELLSHGHPRLVQGGQDGHRVALPHRPLRGRLHAYHRGLPPQVLLHPRRGLPARHPRHVRQPPVPRHAAPLHPHRSSTPSLASRTKPRRTWTCPWSSAATRVTATSTARWTSARSSSWWATTPSAAPTSRSRPRRTAAWTRCSARSSPWPSCPAR

SEQ ID NO: 34171 - protein, 53 aa, Homo sapiens
LELQVPWVPEVPQVPLERMEMMGKLENLVVLVSVGLLGLRVLEDCPEQLASLE

SEQ ID NO: 34172 - protein, 40 aa, Homo sapiens
LVVRWAVLVFRSSTAALPRAAEAARRSEKWPKTSALGRRS

SEQ ID NO: 34173 - protein, 45 aa, Homo sapiens
LLLLLFLVFCFSVPTQHIVYDSVYTYYLVIMKKLILRTLKCYTQC

SEQ ID NO: 34174 - protein, 62 aa, Homo sapiens
MPWRSWRPGWPACAGAWAPSRSTSSSAAAACPRSPALGQGSTPRASVSETSCSSTPAGSGQR

SEQ ID NO: 34175 - protein, 43 aa, Homo sapiens
LQKHIFHYGGPPAGLALTGSFVTLQMSWSVSFFLQEALEPGSA

SEQ ID NO: 34176 - protein, 19 aa, Homo sapiens
MFYKLLFLTFSHTLMIPAR

SEQ ID NO: 34177 - protein, 113 aa, Homo sapiens
MTYFLSFFLSCLLWPSDSCPRRPQPPPGPAAPGRAAPLGGRLRARGDGGPGRLEEAGGLRGGGAPRSWLAEHERPRSQALQVQMQREPGSRDDKIQPESVEVTPQWRDSSPCV

SEQ ID NO: 34178 - protein, 12 aa, Homo sapiens
VEDITNMLLLLF

SEQ ID NO: 34179 - protein, 239 aa, Homo sapiens
LANSLYSVGLPHHSHGTEPMWHGNHVQPGATHRPNQGLEMLQGLGIGILTISIVVGLMILQMCIAASFFLQPKLGTADKQKPLALNNRKAFHNFNYFLFFYNVLLGLGACLSRLLISCLLGMWLIARIDRTIMQSGYEGADMGFSAWIGMLYMDHYHINPVLVSFCHILITNHREKKLQQSTKYWCLNQSAGPHVSARSRTRWFLLQTLIDNPRLTMHRKLKLGHSSQESQILMACSES

SEQ ID NO: 34180 - protein, 36 aa, Homo sapiens
VGPESWFPGSLLRVWVSGHSGPVCVPVCVYVCVYVS

SEQ ID NO: 34181 - protein, 60 aa, Homo sapiens
LSGRQLMDLGSTPLRTQGTARGREGEGCRREELMLHTWMVIRLLWKYKKQFLFLILWILT

SEQ ID NO: 34182 - protein, 86 aa, Homo sapiens
MQQRSRKDQDASGGNAHDLHRSSVCALVFSRDAESRHTGSRSTDTTSASLTSQETSCVTGPAVTAGPVKYLPGGSSCYLTHNLLIP

SEQ ID NO: 34183 - protein, 40 aa, Homo sapiens
LVVLSLSVTGVLLLALEKVKRESVFLYGNLGKQQYATVQN

SEQ ID NO: 34184 - protein, 46 aa, Homo sapiens
LKRLGLSLLVHASSASGQQVYKGGKRLLLDFFFSFFYKSKHLKMET

SEQ ID NO: 34185 - protein, 32 aa, Homo sapiens
VAEVSGQSARARMIPKSLLRHRREQDWHGWQE

SEQ ID NO: 34186 - protein, 6 aa, Homo sapiens
VWAPGA

SEQ ID NO: 34187 - protein, 31 aa, Homo sapiens
MLSAHAPQFGPVNTCTTQVPWGGIWPVMVIR

SEQ ID NO: 34188 - protein, 28 aa, Homo sapiens
MDEAKRAESISAPRNGQGWLLEQRFRRW

SEQ ID NO: 34189 - protein, 28 aa, Homo sapiens
MLSWRCTGPGNEQVVAQMSQTLTILIEI

SEQ ID NO: 34190 - protein, 22 aa, Homo sapiens
MNEIEGGGVRMYVYESLIISGQ

SEQ ID NO: 34191 - protein, 90 aa, Homo sapiens
MTCWCRRERRGRRGWPGARGGDSVSHSCCFGAGPGRCRDVWRQESDDCRRRSAGALHLGPLPNRPRAHAPPGPRSEPAGGRGRALLARTD

SEQ ID NO: 34192 - protein, 46 aa, Homo sapiens
MHSGKELQCCVAQSPDLTFPLVQTRWYMPVIPTLRQEDHSSPEDQD

SEQ ID NO: 34193 - protein, 52 aa, Homo sapiens
MGNGSCVTTSTLARQRLDEEPPPDQFGPGICHVGILLLQKVCLVSPKLTSLQ

SEQ ID NO: 34194 - protein, 40 aa, Homo sapiens
MTPEILGLLGFIPSEPGLAFLGCKLRAGSRSAEPRFSHLP

SEQ ID NO: 34195 - protein, 92 aa, Homo sapiens
MLPHPQFSGSVRPEPQSPVSRGCVCGCHYSADTLAPPQRVAGPGNLHLNRPWLSHFGNCPKHLSNMGQVLRPKIRNLLNECMKVEPFPLMRR

SEQ ID NO: 34196 - protein, 8 aa, Homo sapiens
MSHPRGPG

SEQ ID NO: 34197 - protein, 76 aa, Homo sapiens
MAVSPALFLSPVPCEESACFAFTFGHDCKFPEAFSACRAIILSPQLDNAQTANLLVLTAASKLEVFLSLTLHSCLV

SEQ ID NO: 34198 - protein, 211 aa, Homo sapiens [sequence omitted]

SEQ ID NO: 34199 - protein, 36 aa, Homo sapiens
MKLSSSVEQVLKVPNRWKRLSLWKLCRIQTSILSHL

SEQ ID NO: 34200 - protein, 27 aa, Homo sapiens
MTSILLQLPLPLSGSCLAVWCHELGVQ

SEQ ID NO: 34201 - protein, 52 aa, Homo sapiens
MDGKNKPAIPRGPTDPLKEVGCSCRTRETPKTVSVQLPKWERETLLSGTDTP

SEQ ID NO: 34202 - protein, 29 aa, Homo sapiens
MVPPPPPPPPFAPHDKLPVLPKGGRRLQA

SEQ ID NO: 34203 - protein, 37 aa, Homo sapiens
ISARVCPLFSSLLVAKCSWNQFDTGELRLKPRRNNHF

SEQ ID NO: 34204 - protein, 39 aa, Homo sapiens
RSVGREESVEPPFHSLRERIGRAHEPSNPWLKHPLPKPG

SEQ ID NO: 34205 - protein, 20 aa, Homo sapiens
RSLSSFTASSASLCLCCVCG

SEQ ID NO: 34206 - protein, 13 aa, Homo sapiens
LANTGLKTGMGRA

SEQ ID NO: 34207 - protein, 8 aa, Homo sapiens
VSRSLSSK

SEQ ID NO: 34208 - protein, 55 aa, Homo sapiens
ILHLCRPGEQSKKQVPHTNKTKDANLSGRPNKKLIHGGMQLSHPNDFISLTPTNR

SEQ ID NO: 34209 - protein, 15 aa, Homo sapiens
KPFRVMPACLLMQLF

SEQ ID NO: 34210 - protein, 31 aa, Homo sapiens
LESVSSHRRSSARSVPGGRCADGCDCRILAG

SEQ ID NO: 34211 - protein, 35 aa, Homo sapiens
RFQRSRQAAYAAYFKLCYLRHRNQERCNGPASAHV

SEQ ID NO: 34212 - protein, 12 aa, Homo sapiens
MGLPRGMEAPRG

SEQ ID NO: 34213 - protein, 79 aa, Homo sapiens
LCPCIVSPWAPTAASSAPVPPGSPCWCLVFFSLSCPCVEGSKLRVSSPIPSLLLTAGLDVVYCGLFYFLHFVLKLKYAK

SEQ ID NO: 34214 - protein, 29 aa, Homo sapiens
LTGMLKGQRDGGILPERTSMGPSRSNSFL

SEQ ID NO: 34215 - protein, 25 aa, Homo sapiens
VVALFFCSLQCMYCCCSFFGSLPRL

SEQ ID NO: 34216 - protein, 31 aa, Homo sapiens
TRPLSSPLASLAVSAFRSLAEAEARERSKED

SEQ ID NO: 34217 - protein, 23 aa, Homo sapiens
TGLVGVQRLGSVAFSPAVGARGK

SEQ ID NO: 34218 - protein, 20 aa, Homo sapiens
LAMDDRWVLGACSPQRLTVT

SEQ ID NO: 34219 - protein, 46 aa, Homo sapiens
LELLLLLLLLLLGLSLISERASKRARGEKGRECPPSTLRSWARSHS

SEQ ID NO: 34220 - protein, 14 aa, Homo sapiens
LGVLDPRPAAPGWR

SEQ ID NO: 34221 - protein, 27 aa, Homo sapiens
LVIREERYLGFWFFSLIIMNIGFSPLK

SEQ ID NO: 34222 - protein, 41 aa, Homo sapiens
KMLGCGFNSGWTVVLLIPSVCFPTHDLLFPWPRHTKNNSIK

SEQ ID NO: 34223 - protein, 14 aa, Homo sapiens
KYKLCFLFGSIGVL

SEQ ID NO: 34224 - protein, 23 aa, Homo sapiens
MSFDHPEKNGPWPADPINLPSHG

SEQ ID NO: 34225 - protein, 10 aa, Homo sapiens
IIFMNVFSLL

SEQ ID NO: 34226 - protein, 27 aa, Homo sapiens
IFGRAAHSLLSSVFCAWTLWAHPGHGG

SEQ ID NO: 34227 - protein, 36 aa, Homo sapiens
MMRTLRCVTMTMMGCFPSLESVTWGKQGGPGKRMKN

SEQ ID NO: 34228 - protein, 13 aa, Homo sapiens
VAGVVAAMVKFAL

SEQ ID NO: 34229 - protein, 23 aa, Homo sapiens
MWILRDRAVHELQAVLLALVLGR

SEQ ID NO: 34230 - protein, 26 aa, Homo sapiens
LMFPGIMLRTAFRVAALFSSLHLGNT

SEQ ID NO: 34231 - protein, 25 aa, Homo sapiens
LLLLLGLRWTFLFLLFFFVFPLSSF

SEQ ID NO: 34232 - protein, 72 aa, Homo sapiens
MTPSSVGSVTGSSSAPSPGQAPGSPQGLWCWPGCRPWAGMGRCWRCRSWRSGCPGPQLACSSCCACASMMAS

SEQ ID NO: 34233 - protein, 62 aa, Homo sapiens
MPSPALGPAPLGTSRACVPSTLTATGWWSWAPGASGAPSICSTSSSAATSWAASRREPSTTS

SEQ ID NO: 34234 - protein, 67 aa, Homo sapiens
RKSSYLQELHHNLEGSSWSCEFSLYSVTIPDHLIKMLPPSIGFIELVTSYCCIAFFSFFSCTLNNLT

SEQ ID NO: 34235 - protein, 14 aa, Homo sapiens
LNLHKFACFCLLLS

SEQ ID NO: 34236 - protein, 100 aa, Homo sapiens
VRLLCASSMWAPLCSCQSRVSSMEAPSVGSMRSTACPVPTRTIRGRPWKASSSSLVWSPLQVTMNSECVDGWVDGGWQVGRLQGHSWQRLWVCRGPQVPL

SEQ ID NO: 34237 - protein, 25 aa, Homo sapiens
MARSQLTTTSAFFFLLFLKLVVKSR

SEQ ID NO: 34238 - protein, 54 aa, Homo sapiens
MEVCCECKGGSILCFLIYKPWFFGAGFCVRMVFTCSVFSPSPSIRFFKKEMETF

SEQ ID NO: 34239 - protein, 13 aa, Homo sapiens
IFVLTHIHVFLLH

SEQ ID NO: 34240 - protein, 57 aa, Homo sapiens
ITMIHVFYSKVLNMGVSFFYSLSLMTQQKRNCRPWDNQHLNKLYNYFFKLSYRVIRL

SEQ ID NO: 34241 - protein, 12 aa, Homo sapiens
IVLYCFILTLFP

SEQ ID NO: 34242 - protein, 40 aa, Homo sapiens
INNFFLSYTFFRYKRLTNIVQFLLLVGFLSCVSLVFVKFN

SEQ ID NO: 34243 - protein, 12 aa, Homo sapiens
ILLMLINLIGFS

SEQ ID NO: 34244 - protein, 43 aa, Homo sapiens
KKMKGLFLLTTNVSVPGLLPGSSVLPKILMRTLWRETSELLFL

SEQ ID NO: 34245 - protein, 39 aa, Homo sapiens
LRSVALVLFKICLVSFHFGFFSRHVFLSELRFVLVLCTL

SEQ ID NO: 34246 - protein, 9 aa, Homo sapiens
ICNCFLFFV

SEQ ID NO: 34247 - protein, 45 aa, Homo sapiens
RSLMSRMKMKCLMPLCCHPRSTEQAGCWTFYIPRGKGAMWSSWRA

SEQ ID NO: 34248 - protein, 78 aa, Homo sapiens
KNGFLLQWREIITDGGTRRPSFPHRLLSLEASSEDLVGLSFWVWAISVLMCVLFYHYCIMVFKPVGTQRTSLCNNNEE

SEQ ID NO: 34249 - protein, 16 aa, Homo sapiens
LIWGRLGFPCMLFYMV

SEQ ID NO: 34250 - protein, 34 aa, Homo sapiens
LQKESVPRCRLLWAAAVGQRVLAVLAGRVTHARQ

SEQ ID NO: 34251 - protein, 24 aa, Homo sapiens
VLCLQFFLQFSIEVLCLSYEMAVI

SEQ ID NO: 34252 - protein, 19 aa, Homo sapiens
LAFYLVLFLVLHWWSVFCE

SEQ ID NO: 34253 - protein, 26 aa, Homo sapiens
MGARLLQLTADFSPKEVTVSQPNLSG

SEQ ID NO: 34254 - protein, 35 aa, Homo sapiens
LRKASWSVFSSCSLFSLTFLSSSPEFLWIWWLYEE

SEQ ID NO: 34255 - protein, 55 aa, Homo sapiens
LIIVMVAGAAAAAAAQPSVRCCSLRGVLQRTSPIYFCSRLGLSMCLLPPARGFDI

SEQ ID NO: 34256 - protein, 66 aa, Homo sapiens
LLLSPGSCFLICISSGAGQVTTGGGMPEAARTGREGAPWIYSVNLLEGCWQFFLFVHHPALFNNCT

SEQ ID NO: 34257 - protein, 53 aa, Homo sapiens
MGNCIPIQGSIGSSNKSGKTYYKFVAVIQLLIFSRGLTPLDSGWSWEDVNPVP

SEQ ID NO: 34258 - protein, 44 aa, Homo sapiens
LLGKRPSLWSFVTAALADECRPHFPPPWCHCLWTACQPHRTSYP

SEQ ID NO: 34259 - protein, 35 aa, Homo sapiens
MQAALPTAMVPLSVDSMPASSHELSLKMLKLAGCS

SEQ ID NO: 34260 - protein, 31 aa, Homo sapiens
MSFLICVYSYLTVLFFLLIYINSFLPFFLNF

SEQ ID NO: 34261 - protein, 35 aa, Homo sapiens
LALFASTLGTGVWVTGARALPSPPGRCMGNCPRRK

SEQ ID NO: 34262 - protein, 29 aa, Homo sapiens
MALWKDAVPPVIKLLWWCFFLMYLGKLKI

SEQ ID NO: 34263 - protein, 24 aa, Homo sapiens
LYLMLLLVFCVVCQRLSQLILYHI

SEQ ID NO: 34264 - protein, 42 aa, Homo sapiens
MINIFCTCLIFFLKTLLQKGKDCLERMHIFSLFISVVTAFAV

SEQ ID NO: 34265 - protein, 18 aa, Homo sapiens
MNNKTTTTTTKKAFWDFG

SEQ ID NO: 34266 - protein, 40 aa, Homo sapiens
LDPTKDRRRFFCSNVGVRRKSAVCSTIIQCLLYNTFAVLF

SEQ ID NO: 34267 - protein, 148 aa, Homo sapiens
MGDLSRTALWLGGRRDPSGSFRVRDGAAAEVGRACLGLPSECGSLVRARASPRPLLGPAVCPWRARSPRPGLPRPSPTCPWKRGGDWCALSLVAPAASRHPPLSASEQRIPPTSTCTCTRPLGNPLAFLTTVQNQKQIEHWENKDDAS

SEQ ID NO: 34268 - protein, 33 aa, Homo sapiens
MQKIRGFTVLTRLILNFWAQSVHLPRPPKVLRL

SEQ ID NO: 34269 - protein, 59 aa, Homo sapiens
VFPLKIRTTVLAGESHKRTRDLFKSLLLSLLTGIHRTLLIRKGYETHVLLQSPVVSVGA

SEQ ID NO: 34270 - protein, 138 aa, Homo sapiens
LVEPQLGRLEGLQALPHGPVEDFPVLFLVLRGRELVSAVQMLVLRDQARRSQLCPPPDILALLPQELSTDPPWSQEGTRKPPHGVPAGSSSPQPAVPTSCRGLYRPGATTALSVTLSSRGWALPQGSCMTMATYRRRP

SEQ ID NO: 34271 - protein, 178 aa, Homo sapiens
LGCVSWSQAAFLLSVRGQPSPHSHGQATQNEHDSRGPRPGAEPGAGSGRREGRVGVRGSSHRTAGTEARQALIRSVGTRDTEERCWAPGRCLLVPGWPQTSTASRKEPSASGAHQKPALSTRRASARPGHHPTSQGAGPVTDGSPRPHGQHRLTTALPRPGWSGRSGGAHGSHLGPWR

SEQ ID NO: 34272 - protein, 78 aa, Homo sapiens
LKRPRTSGHQTGWLPRSRSLRPGRPWHPYTLGLLPSSASLAPARLHPGLRLLVTGCVSPFCPWAAQSPQSRPSHAERT

SEQ ID NO: 34273 - protein, 32 aa, Homo sapiens
LPSGQVPAGSGCIFLSALVSMVTGVTLPPEYG

SEQ ID NO: 34274 - protein, 146 aa, Homo sapiens
VDITAMSLFASDLWAPLLTPAVQALSSARVPGASGAVCILFLCEVCCRTDAYCARIGGRARGSPAWPGPRGVRFPAGRGAPVPPRVLPRGPGFESLSQPLPAAACTGRASVHTQHTPATQRALACHSGTKPVCLCGSTAWQSRAVT

SEQ ID NO: 34275 - protein, 24 aa, Homo sapiens
MKPVCFSAATSPRSCSGWCPPGPR

SEQ ID NO: 34276 - protein, 26 aa, Homo sapiens
MKPVCFSAATSPRSCSGWCPPGPSAL

SEQ ID NO: 34277 - protein, 68 aa, Homo sapiens [sequence omitted]

SEQ ID NO: 34278 - protein, 45 aa, Homo sapiens
LMAASGGTKKAQSGGRRLREPSSRPSRRARQRPRRGALRKAGRFL

SEQ ID NO: 34279 - protein, 111 aa, Homo sapiens
LWGAFCSCFLILFGVGTEGTSRPPVRLRECRRPGREAQMMGKQSHLEGVSWGQCQGDLTGQFILKQHYSVRFFWVRNSSWEVWSSGRRGGQKHPLVFLSHLEALSSSPRYW

SEQ ID NO: 34280 - protein, 60 aa, Homo sapiens
MERLSHMRPWPCLQAPAACQTLSPLGLYLAASQQAFAAGFTGFGGFCVLTIDSQAPESAA

SEQ ID NO: 34281 - protein, 202 aa, Homo sapiens
LLCSCLLIRASRSLTFSTQRLLVSSISNQQNIFLELSFLTSAFLTHLFFGGFLFPALYLLFKLKPVHFKLFAHRLVLLFYALNYLCGIFDSSAGEDHSLKKTSNSNSKQTKMKKWGERICPLGTLYVTVLLWKTETALGTWRGGSAVQAGAGPCGLLGSGLVWPITHAAVSSTRVAVVGFPSVSCFLTVLPTCFLQGRWPGP

SEQ ID NO: 34282 - protein, 57 aa, Homo sapiens
MCFMLKLLIDVQTNLLSLNPSSSSKCKTSMTTLQNSQMDHTLLLCLKCQIWVPLFYR

SEQ ID NO: 34283 - protein, 37 aa, Homo sapiens
MKSRQYVRSASAHLSLAPGLIVTGLVLPHFMPRLRAP

SEQ ID NO: 34284 - protein, 41 aa, Homo sapiens
LLRPSVLLLLQLPFLPSALLPNSLALLGNIDKLEPRSSWEF

SEQ ID NO: 34285 - protein, 31 aa, Homo sapiens [sequence omitted]

SEQ ID NO: 34286 - protein, 145 aa, Homo sapiens
VTCPPSFRSPFPLHYPGLEPEPGGAPREWKSLGHAKVDPTQPPAVPSTPQTPPSSEATPRSCGRGPIWTPGSAGSAGRTLLSAAGRGGVRYLPGLPNPLEGASASKWFESGPLLFSRSKKIEQLTSFVCKTSFLASDLCYKVTRA

SEQ ID NO: 34287 - protein, 82 aa, Homo sapiens
LGTGERRLKSPDAGFLGWAFCLTHSFSLFLDFTDRSRNSFPHNGASCPRAGSTHRLMWQTLLPGKTKELSYSWRRTLRMLST

SEQ ID NO: 34288 - protein, 47 aa, Homo sapiens
MLGFFVCLFVCLLFFFSTALVVPSLSLEQGWLFFFNKIAGAQDCFPP

SEQ ID NO: 34289 - protein, 19 aa, Homo sapiens
LFVTKTVILLLLPPNCIRP

SEQ ID NO: 34290 - protein, 45 aa, Homo sapiens
MGILPGTKDAKLKTTIKAFFPKKHRRRFNHQMRGLTHLCILALIL

SEQ ID NO: 34291 - protein, 56 aa, Homo sapiens
LDSKILSLSLLTGIPISLVARCTYTSSTAVRTDRRQSFHVALSKSHLTSRPQCPHL

SEQ ID NO: 34292 - protein, 43 aa, Homo sapiens
MYSTFKKHFKANTYLYVHVKQIPPQLFSVLLFVVFSCVYLVEL

SEQ ID NO: 34293 - protein, 80 aa, Homo sapiens
MEAQGRARRPSPGKSSRKAECATALRGGPRLPECGRCCRCKQCLEERKAGNRVFAASVTTAHKKTSFWERGMIVGTLRIT

SEQ ID NO: 34294 - protein, 40 aa, Homo sapiens
MKIRRSCIHKTCVQKIKLFNPLVPGTIAEEVGVWTCKDLL

SEQ ID NO: 34295 - protein, 33 aa, Homo sapiens
MCFHCWLSVFKFSFSLMFLSCFASLITFSFLVF

SEQ ID NO: 34296 - protein, 54 aa, Homo sapiens
MFFCRNYGSFWFYVLSKMLSFFICLLIFVHLLLLSFLISDWPPPTGSAEHKYSG

SEQ ID NO: 34297 - protein, 18 aa, Homo sapiens
MEKAPHRDEETVHSTTSS

SEQ ID NO: 34298 - protein, 44 aa, Homo sapiens
LALSPLSCFVAGILAKTLSLPPYSSRVVIFFFHQEISLAGNLSN

SEQ ID NO: 34299 - protein, 41 aa, Homo sapiens
LFITKEFMKKKAFAICLRKLFFKKKSYLLLVSMEVYVTIFM

SEQ ID NO: 34300 - protein, 32 aa, Homo sapiens
LKLKIETILCFLNCYSTFLSILVTESCKNGTF

SEQ ID NO: 34301 - protein, 57 aa, Homo sapiens
LFSMSVKCRGRITHSGGSPLACNEQSYGEAHVTVAMRVTLEVKPAAPVKPLEDCSPG

SEQ ID NO: 34302 - protein, 54 aa, Homo sapiens [sequence omitted]

SEQ ID NO: 34303 - protein, 16 aa, Homo sapiens
MEPETYDARCLDKASR

SEQ ID NO: 34304 - protein, 52 aa, Homo sapiens
VTGFWMADHSTFFFLSFLLCCHLPLISASFCDSLTEKEVEWNKIPQYSTIIH

SEQ ID NO: 34305 - protein, 40 aa, Homo sapiens
MWFTPASLVVCSFLVSSIIPRTSFSATCQKHQHQPGGTLP

SEQ ID NO: 34306 - protein, 110 aa, Homo sapiens
MKYCWPTLTFQLFSLHIVNDSPGDIILKSETQKRTQSPICLKNCMAIYLVNIFYFIRKNRQFNCRCDRFRLPSLSFLTSSYILQPPPEKQYGTGKKRSKGRTLGLHSQHC

SEQ ID NO: 34307 - protein, 98 aa, Homo sapiens
LPVGLGKRGPLVAQSGGSWEILGWPSHTLRRRRFCWTPGENHGSCSHQLPLHSPTGSDPTPHSPPDRKQEGGSRGLCVPPTGDPSRQPGVTSPSSSST

SEQ ID NO: 34308 - protein, 24 aa, Homo sapiens
LLPFLLLLSSFLLIPFDALHMLFA

SEQ ID NO: 34309 - protein, 20 aa, Homo sapiens
LYILLLHLLLIKLVAPFTFL

SEQ ID NO: 34310 - protein, 44 aa, Homo sapiens
LYETCEEEYMGLRTKKWKQEWTHLSFPMTSWGTLCFLSLQLWAL

SEQ ID NO: 34311 - protein, 21 aa, Homo sapiens
MSPLKSLWKELGHEKSPHEWD

SEQ ID NO: 34312 - protein, 58 aa, Homo sapiens
MLWDLTVLDTCMAVCCGLCLACGSLLLWPPPPLMYKPRLCSASLGPRQAAVHSLTREV

SEQ ID NO: 34313 - protein, 23 aa, Homo sapiens
MKTGLLILTFPSQSLALFKLLGN

SEQ ID NO: 34314 - protein, 44 aa, Homo sapiens
LSMLSLLLLESPARIEGLTLPPRLDAMQRYVDLGSLQPQPPELM

SEQ ID NO: 34315 - protein, 25 aa, Homo sapiens
MSLSLFLFPFFGNYFLLIFIFSISL

SEQ ID NO: 34316 - protein, 56 aa, Homo sapiens
LGGGYHSRARNCKENRMLTVSLYSFLARKKRLWYSNFIFMILTLKLGMLPAWLLLT

SEQ ID NO: 34317 - protein, 26 aa, Homo sapiens
LFCYSVKLFSTVLTLQLTVQLHSSWT

SEQ ID NO: 34318 - protein, 47 aa, Homo sapiens
MPEYCPQAERRLQRGAGFQQARLTRSLAFPVLALGRPRCCFPLGASF

SEQ ID NO: 34319 - protein, 58 aa, Homo sapiens
MDSKLGVKVHTWVSEAQYSYTSLLSMTATFLQGLKKMLQKIGTLLSLPNLLLPLMFLP

SEQ ID NO: 34320 - protein, 56 aa, Homo sapiens
VESKWNLDLEKSFLNIYPLPCWFSFSFSSFFFWLLFSSPLLRSSLEMNTSRLHPRK

SEQ ID NO: 34321 - protein, 63 aa, Homo sapiens
MKLRATENTCTMVSGRSLFPQPKTDSFAGHLFSTARTLPLSVERGRGSAYGARRSDSAVNTLG

SEQ ID NO: 34322 - protein, 8 aa, Homo sapiens
LTMLCFFF

SEQ ID NO: 34323 - protein, 54 aa, Homo sapiens
MFVFMAFLSIVALPKNKMSLPEALKSLTWSIFKTGSFYQVHHFLCITFMQAESG

SEQ ID NO: 34324 - protein, 53 aa, Homo sapiens [sequence omitted]

SEQ ID NO: 34325 - protein, 9 aa, Homo sapiens
LSVSLLSLL

SEQ ID NO: 34326 - protein, 29 aa, Homo sapiens
LILHMFVWEKGCCVFFLLLFIFWIGKSLA

SEQ ID NO: 34327 - protein, 32 aa, Homo sapiens
LAKWGLGPSEPCPAPLYSVCAMDFVFLGVLLM

SEQ ID NO: 34328 - protein, 52 aa, Homo sapiens
LFSSSCLPSLPPFSFLPNSLHSNQFLDASSSFPFLLLFPSCVVLLPTSCFHP

SEQ ID NO: 34329 - protein, 37 aa, Homo sapiens
MQRPWVCVFIALSCWLPAAPPVPGRALGQRLSAPPPS

SEQ ID NO: 34330 - protein, 6 aa, Homo sapiens
KMRRRL

SEQ ID NO: 34331 - protein, 34 aa, Homo sapiens
MIMINEDTALLVLPCTILPMTRGLASYCILRTSS

SEQ ID NO: 34332 - protein, 25 aa, Homo sapiens
VITFYSTMYMYGIVLINELGKDVIN

SEQ ID NO: 34333 - protein, 35 aa, Homo sapiens
MAPTSPPVSTLGLLLFRRTTSGPPSSKTARAVVVP

SEQ ID NO: 34334 - protein, 44 aa, Homo sapiens
RLKQPKVSWSLCDSGKKWREHSVSPTSFLTLLPYLSFFPTGLSR

SEQ ID NO: 34335 - protein, 51 aa, Homo sapiens
KAPIRRLPHCKTTWLSLCTAMSPLTTEIWALRRGNSSASWSRAASGGRRSP

SEQ ID NO: 34336 - protein, 48 aa, Homo sapiens [sequence omitted]

SEQ ID NO: 34337 - protein, 14 aa, Homo sapiens
LRFPMGLACGAWAL

SEQ ID NO: 34338 - protein, 53 aa, Homo sapiens
MTSLSTPISPLWTLLHLRRSKSWSAMLPSLSSCTAKILKSRMPPFSQRKIQDT

SEQ ID NO: 34339 - protein, 20 aa, Homo sapiens
KGPKLTLVLQMWMFMAQIGT

SEQ ID NO: 34340 - protein, 23 aa, Homo sapiens
RRPRACTSLAVSSPSASGAFSVE

SEQ ID NO: 34341 - protein, 18 aa, Homo sapiens
LFFLKKYTSCLLYFALGT

SEQ ID NO: 34342 - protein, 35 aa, Homo sapiens
MRNHHSSFRIDAVIFFFGFWFFQPSWLASHMPACH

SEQ ID NO: 34343 - protein, 45 aa, Homo sapiens
KPKKMKGLFLLTTNVSVPGLLPGSSVLPKILMRTLWRETSELLFL

SEQ ID NO: 34344 - protein, 20 aa, Homo sapiens
RSRWWDLTVGPISLFSALLA

SEQ ID NO: 34345 - protein, 44 aa, Homo sapiens
KLKHFQSLSGAQRFGRLIDHGARVLLVAAAAAAGARLCDHARTL

SEQ ID NO: 34346 - protein, 41 aa, Homo sapiens
LWVCECLCVLLFTSHLLKSVYVRGWGVCVKESEEEKEREIN

SEQ ID NO: 34347 - protein, 40 aa, Homo sapiens
KILLIYFLIMLISNEDSCLKIFFNLMVSIFCKNHVNLFHS

SEQ ID NO: 34348 - protein, 41 aa, Homo sapiens
LSLLCPPPPPSAFALLSSFSPEVRAASSPLVLFLPSLCSLL

SEQ ID NO: 34349 - protein, 38 aa, Homo sapiens
KQRKVHPSLVSRTRRLVQVCLFWTSSMPSNQVPLTMTF

SEQ ID NO: 34350 - protein, 21 aa, Homo sapiens
RPCYAVYLGVLYVLLPMPSLK

SEQ ID NO: 34351 - protein, 35 aa, Homo sapiens
LEGSSLSMLDFQWQLQWPFMWLAVSLVVTSTQLCL

SEQ ID NO: 34352 - protein, 51 aa, Homo sapiens
MGRCCSRSCWWPPLPAWPSSSLPSARGTPPDTRPFWAWRSWCWRCLRPSLC

SEQ ID NO: 34353 - protein, 53 aa, Homo sapiens
KGLQKTFLSHIFLLLISQQLKFQLMDSILPVKTSSPENCASWHPAVPKYYLTH

SEQ ID NO: 34354 - protein, 32 aa, Homo sapiens
MALGALLPFSIIMWTTGATAQSKTLQFLSGLN

SEQ ID NO: 34355 - protein, 93 aa, Homo sapiens
MRFLISIICTWRFIQERITGADLNHGAHKWGGCSSGHGKNFLLQLETAFCVAGYHADSTNTNPHLDAVQTPDVPPISVSLGNVSMTERLKDRV

SEQ ID NO: 34356 - protein, 69 aa, Homo sapiens
IRVGIKRRKAALLELCGLLQVRVAGNRTTLLLEEKEEFIFSRHKKSSFFFRDSSLLLNKELTQRLTQRK

SEQ ID NO: 34357 - protein, 60 aa, Homo sapiens
MCLYVFPSTIIIVIINFFRSKLNISQLKFLSSIQHLLYQNLIFKNKTFLEFIIDVCLMAS

SEQ ID NO: 34358 - protein, 74 aa, Homo sapiens [sequence omitted]

SEQ ID NO: 34359 - protein, 19 aa, Homo sapiens
MSAIYPPLLGALSFIAASS

SEQ ID NO: 34360 - protein, 74 aa, Homo sapiens
MWRSSARASVVMTVFALRGEGMCDHFQRLTCIPQIVWMSYNLNLQTQYSQTLGSDSLQASCTSPRKRACFPLDM

SEQ ID NO: 34361 - protein, 40 aa, Homo sapiens
MASFLEACETTNPSIKKRPLIRRRLLVSFLGTHSGFLQSR

SEQ ID NO: 34362 - protein, 33 aa, Homo sapiens
MCVLAFLTTPLLCISFFQACSKFSSVRPFAGLV

SEQ ID NO: 34363 - protein, 43 aa, Homo sapiens
MSCRSCLRCRLKSVKLMSSSLWTTTAVSTWTASLLRSRPSTRI

SEQ ID NO: 34364 - protein, 70 aa, Homo sapiens
MDASLPRTTERVSLCCQAEVLWCDLSSLQPPLSGFKQFSCLSLPSSWDYRHMPPRPANFCNLSRDGVSPC

SEQ ID NO: 34365 - protein, 44 aa, Homo sapiens
MHLIPHSPNFYNLSRCSLLRTTKQEKITFGLRNSQSFSLSRKAQ

SEQ ID NO: 34366 - protein, 41 aa, Homo sapiens
ILARSDPRIFLLSRETRRIMRLFLVAFQEYEEKNGSQSGFE

SEQ ID NO: 34367 - protein, 37 aa, Homo sapiens
LHLEHRANIVTFPVMASFLSPLPTVLLRAGSTPWSTP

SEQ ID NO: 34368 - protein, 55 aa, Homo sapiens
LGADIHTHIHTDTQSHTHSHTLSLSLPLSFSLSLSLCPFLLDRSTVIHRNKHTRT

SEQ ID NO: 34369 - protein, 4 aa, Homo sapiens
ILAS

SEQ ID NO: 34370 - protein, 12 aa, Homo sapiens
KRPNTINILPCW

SEQ ID NO: 34371 - protein, 36 aa, Homo sapiens
ILTLPLIKQFRPLALIVLAGVVCSRLKRWSEGERRK

SEQ ID NO: 34372 - protein, 33 aa, Homo sapiens
IVPHSTATSSTLVSKISLLPIAMILCLKPCALG

SEQ ID NO: 34373 - protein, 19 aa, Homo sapiens
IYLRQILSFFLSPIFSGSL

SEQ ID NO: 34374 - protein, 35 aa, Homo sapiens
ILLLKTWGEIISLSRPCYAVYLGVLYVLLPMPSLK

SEQ ID NO: 34375 - protein, 13 aa, Homo sapiens
RGFTMLAMVVSIS

SEQ ID NO: 34376 - protein, 13 aa, Homo sapiens
RYFLLLFFLFEFL

SEQ ID NO: 34377 - protein, 27 aa, Homo sapiens
LSGYPDKSGLVFLMLPLLVLSSLSAKC

SEQ ID NO: 34378 - protein, 42 aa, Homo sapiens
METIRRLSIHLNKYLALTPPRRNSLMLWLIPWSMTSFMAKMV

SEQ ID NO: 34379 - protein, 25 aa, Homo sapiens
MYKPGFFFYTTLTHLLHSFSCEICE

SEQ ID NO: 34380 - protein, 45 aa, Homo sapiens
MHQVSGPAMTLSLCWASPCCWEPPGPWPSFLLASSCCPSCSSSPS

SEQ ID NO: 34381 - protein, 57 aa, Homo sapiens
IRPCCRGLHFLLSTGPIYEEVAYESVMFAYFLTGSGVILAHCNLRLPGSSDSPASAS

SEQ ID NO: 34382 - protein, 13 aa, Homo sapiens
ILRLLEITLLMTS

SEQ ID NO: 34383 - protein, 47 aa, Homo sapiens
LWRLVSASCRMKLSVSVEPGISGRGRYKIFKWRSIPEPNHGCDFIYR

SEQ ID NO: 34384 - protein, 20 aa, Homo sapiens
LAILSLSSSIPQLSLSRTGL

SEQ ID NO: 34385 - protein, 10 aa, Homo sapiens
LFLALSLGLT

SEQ ID NO: 34386 - protein, 23 aa, Homo sapiens
IFFMCRVIVLGVISIIYISLAKG

SEQ ID NO: 34387 - protein, 29 aa, Homo sapiens
MGMVHCHCFSAVANTWITHLILCVFIIKL

SEQ ID NO: 34388 - protein, 44 aa, Homo sapiens
RQNPGLLTSQWGMLFTLQLTLGLPGALSLGCLMRDVQGFSWVGV

SEQ ID NO: 34389 - protein, 67 aa, Homo sapiens
INRKIIKRKMNPQNDSLQIPQGIRRQVQSQRQAMMAMVILVNKKRGDVGGKPPRCRGKRPRARAVPV

SEQ ID NO: 34390 - protein, 77 aa, Homo sapiens
LRATGPAPFRRSDATQWMCTWVGETCSAGGIKPQIREFEGFIGAESEGTAKPPPTLIPDPSVTQLWTVLPPLLLSAA

SEQ ID NO: 34391 - protein, 13 aa, Homo sapiens
INMFLAGLSGSCL

SEQ ID NO: 34392 - protein, 9 aa, Homo sapiens
LFVILASVT

SEQ ID NO: 34393 - protein, 39 aa, Homo sapiens
VCMQRPWVCVFIALSCWLPAAPPVPGRALGQRLSAPPPS

SEQ ID NO: 34394 - protein, 18 aa, Homo sapiens
IYLMLLVFFGDLQGKEAG

SEQ ID NO: 34395 - protein, 61 aa, Homo sapiens
VAFGSSTFALVPVFAHLSILQSLVPAAGAASPVAISAQHLCYSHVTPGDPGAGAGQGPAPS

SEQ ID NO: 34396 - protein, 52 aa, Homo sapiens
RRPNAEAAQWCWDSITNNKSNTLITDTPAAQTTLPLCVGNPTQAHFPHWNYL

SEQ ID NO: 34397 - protein, 13 aa, Homo sapiens
MSPPGFAAFFFFF

SEQ ID NO: 34398 - protein, 87 aa, Homo sapiens
KNIFQLVGLDLFVFPYRVVATAPGCGVIECIPDCTSRDQLGRQTDFGMYDYFTRQYGDESTLAFQQTLASCLKARRAAISAGNPTSS

SEQ ID NO: 34399 - protein, 165 aa, Homo sapiens
TCKFAGAASQAPHAPAFLRARGEPQDPLSHPRVPAVSANCRMWKHLPVHSSPTPRLTPLWKLQARWLLPQLVYLQGWGSYSLLRPAALISMVLLAREFLYPAKMSVSEVCSSGLSSPLLEQHKTNLIFYASGDICSANGKSGFNQPLPFLKTFCCTHRILSCTYL

SEQ ID NO: 34400 - protein, 32 aa, Homo sapiens
IFLIFPEVIIFLLPTFQYEGGSSCGGRTRIPR

SEQ ID NO: 34401 - protein, 12 aa, Homo sapiens
LKKVRFPWILAL

SEQ ID NO: 34402 - protein, 23 aa, Homo sapiens
KASLLMVLTFGIGSMYPGQSTSN

SEQ ID NO: 34403 - protein, 16 aa, Homo sapiens
KSCFCRILGQTIYLDE

SEQ ID NO: 34404 - protein, 46 aa, Homo sapiens
MAASPCTFSCLSTLQVPSGLCPHCCIVAGCHRPSAAPGCPGLCRDA

SEQ ID NO: 34405 - protein, 48 aa, Homo sapiens
MSDSICHQGWQKMASPGELKMSFHICKSGCVGTVLNLWIQGSMNTESA

SEQ ID NO: 34406 - protein, 93 aa, Homo sapiens
RQSLWYPGALASMWPLQHISVASVSVVSFLCLAPHGFKSTRAGVETAHLALILSDWWFWPVSRYLSIGKAALRCGGHPDSHRLHSRNGSMRLY

SEQ ID NO: 34407 - protein, 14 aa, Homo sapiens
LPAALLLLLLLWDR

SEQ ID NO: 34408 - protein, 15 aa, Homo sapiens
LRLIMRILATIMFLI

SEQ ID NO: 34409 - protein, 37 aa, Homo sapiens
ILEATCGLLSPLLPFFPRKPTTKKCLVMERTPVENGK

SEQ ID NO: 34410 - protein, 33 aa, Homo sapiens
MASCSLLSFIASCLYSVFWETAWSSWSLWSARS

SEQ ID NO: 34411 - protein, 31 aa, Homo sapiens
KFVAVIQLLIFSRGLTPLDSGWSWEDVNPVP

SEQ ID NO: 34412 - protein, 60 aa, Homo sapiens
KAIQTVTELLWSVKNHGSKHLRNLLKIISFVLLLLMLLLLYLTWVFYNVVFNFNCQSLNM

SEQ ID NO: 34413 - protein, 42 aa, Homo sapiens
LMYWKCFLTFGSLCSHCPHPRPTTKNPAEAETTKRQSSLLLQ

SEQ ID NO: 34414 - protein, 22 aa, Homo sapiens
MALKTPALCTSFLTSGQEQQGP

SEQ ID NO: 34415 - protein, 90 aa, Homo sapiens
RSRPRIWAWRGPWCPWPGFPRPERCVWWGMVPLWTCCCWSCTWRMSAAVVGGPWRTCNAYPGPWALLPPSSSGKWQNECCSRSTGCRAQS

SEQ ID NO: 34416 - protein, 23 aa, Homo sapiens
LESVVFQQFLLLFPWAAWASFHP

SEQ ID NO: 34417 - protein, 36 aa, Homo sapiens
MAGKKLLKTGWVSWLVPVIPTLWEVKLGGSLEGLTL

SEQ ID NO: 34418 - protein, 1795 aa, Homo sapiens
MFSPLKSRARALAHGDPFQVSRAQDFQVGVTVLEAQKLVGVNINPYVAVQVGGQRRVTATQRGTSCPFYNEYFLFEFHDTRLRLQDLLLEITAFHSQTLPFMATRIGTFRMDLGIILDQPDGQFYQRWVPLHDPRDTRAGTKGFIKVTLSVRARGDLPPPMLPPAPGHCSDIEKNLLLPRGVPAERPWARLRVRLYRAEGLPALRLGLLGSLVRALHDQRVLVEPYVRVSFLGQEGETSVSAEAAAPEWNEQLSFVELFPPLTRSLRLQLRDDAPLVDAALATHVPDLRRISHPGRAAGFNPTFGPAWVPLYGSPPGAGLRDSLQGLNEGVGQGIWFRGRLLLAVSMQVLEGRAEPEPPQAQQGSTLSRLTRKKKKKARRDQTPKAVPQHLDASPGAEGPEIPRAMEVEVEELLPLPENVLAPCEDFLLFGVLFEATMIDPTVASQPISFEISIGRAGRLEEQLGRGSRAGEGTEGAAVEAQPLLGARPEEEKEEEELGTHAQRPEPMDGSGPYFCLPLCHCKPCMHVWSCWEDHTWRLQSSNCVRKVAERLDQGLQEVERLQRKPGPGACAQLKQALEVLVAGSRQFCHGAERRTMTRPNALDRCRGKLLVHSLNLLAKQGLRLLRGLRRRNVQKKVALAKKLLAKLRFLAEEPQPPLPDVLVWMLSGQRRVAWARIPAQDVLFSVVEEERGRDCGKIQSLMLTAPGAAPGEVCAKLELFLRLGLGKQAKACTSELPPDLLPEPSAGLPSSLHRDDFSYFQLRAHLYQARGVLAADDSGLSDPFARVLISTQCQTTRVLEQTLSPLWDELLVFEQLIVDGRREHLQEEPPLVIINVFDHNKFGPPVFLGRALAAPRVKLMEDPYQRPELQFFPLRKGPWAAGELIAAFQLIELDYSGRLEPSVPSEVEPQDLAPLVEPHSGRLSLPPNVCPVLREFRVEVLFWGLRGLGRVHLLEVEQPQVVLEVAGQGVESEVLASYRESPNFTELVRHLTVDLPEQPYLQPPLSILVIERRAFGHTVLVGSHIVPHMLRFTFRGHEDPPEEEGEMEETGDMMPKGPQGQKSLDPFLAEAGISRQLLKPPLKKLPLGGLLNQGPGLEEDIPDPEELDWGSKYYASLQELQGQHNFDEDEMDDPGDSDGVNLISMVGEIQDQGEAEVKGTVSPKKAVATLKIYNRSLKEEFNHFEDWLNVFPLYRGQGGQDGGGEEEGSGHLVGKFKGSFLIYPESEAVLFSEPQISRGIPQNRPIKLLVRVYVVKATNLAPADPNGKADPYVVVSAGRERQDTKERYIPKQLNPIFGEILELSISLPAETELTVAVFDHDLVGSDDLIGETHIDLENRFYSHHRANCGLASQYEVDGYNAWRDAFWPSQILAGLCQRCGLPAPEYRAGAVKVGSKVFLTPPETLPPGSSSPTVASGDPEEAQALLVLRRWQEMPGFGIQLVPEHVETRPLYHPHSPGLLQGSLHMWIDIFPQDVPAPPPVDIKPRQPISYELRVVIWNTEDVVLDDENPLTGEMSSDIYVKSWVKGLEHDKQETDVHFNSLTGEGNFNWRFVFRFDYLPTEREVSVRRRSGPFALEEAEFRQPAVLVLQVWDYDRISANDFLGSLELQLPDMVRGARGPELCSVQLARNGAGPRCNLFRCCRRLRGWWPVVKLKEAEDVEREAQEAQAGKKKRKQRRRKGRPEDLEFTDMGGNVYILTGKVEAEFELLTVEEAEKRPVGKGRKQPEPLEKPSRPKTSFNWFVNPLKTFVFFIWRRYWRTLVLLLLVLLTVFLLLVFYTIPGQISQVIFRPLHK

SEQ ID NO: 34419 - protein, 92 aa, Homo sapiens
MLNPPLSPLLSFSVIVSLGISVPRLLFLSLSPPIFPSEAFSPQCLCMFLAAFPLEYISTVAFEAGLLECTPELRIHSNFLDDSQWRKPDAMS

SEQ ID NO: 34420 - protein, 28 aa, Homo sapiens
MLNLLSTLIFHFTFIRTTGAVAEMSHGR

SEQ ID NO: 34421 - protein, 48 aa, Homo sapiens
MDFFFLERSYWGKMILLLVTYSPIAYSHPPRFEIAPLGRLRRARSRAE

SEQ ID NO: 34422 - protein, 11 aa, Homo sapiens
IELYLICMFIS

SEQ ID NO: 34423 - protein, 30 aa, Homo sapiens
ISMGQKVLAGTVLFKSAYLLAGVFVWEEVG

SEQ ID NO: 34424 - protein, 32 aa, Homo sapiens
ICLLIFVHLLLLSFLISDWPPPTGSAEHKYSG

SEQ ID NO: 34425 - protein, 57 aa, Homo sapiens
RIPVMMLMSLSEILSVLFLLHCTEPLRVECEVLIYVCLVELSYQEHIDALKDNPRRV

SEQ ID NO: 34426 - protein, 47 aa, Homo sapiens
LKMILQSLLFLQRLLMISTKPAVVLLWPLLKKVENTLMQHVHPNLPA

SEQ ID NO: 34427 - protein, 45 aa, Homo sapiens
MAFQLVSGGVYMCVCVCVCVPHRHVLFSRLERLTHWKSFEAHFSN

SEQ ID NO: 34428 - protein, 15 aa, Homo sapiens
TKRSLAPFLSLSLSL

SEQ ID NO: 34429 - protein, 46 aa, Homo sapiens
LPPGVTWIQMRRDSNVMLRSLGSHPVTLEETSPRKVLTYRRRTWPG

SEQ ID NO: 34430 - protein, 50 aa, Homo sapiens
IWVSCSWLLHFSMWQTEQSHNAFSAGLKTAHRPELPLYYLKLHRWLVKFN

SEQ ID NO: 34431 - protein, 16 aa, Homo sapiens
LARPLPLAFEAKASSR

SEQ ID NO: 34432 - protein, 32 aa, Homo sapiens
KFPSFGIGEGVSFFLFFFLEPVLIALNKYSLK

SEQ ID NO: 34433 - protein, 65 aa, Homo sapiens
RSWGGTVCLVWVTSPTCPMSWPSFMKPCASPALCLSLFLMPPLPTPLSWATTFPRTLWFLSTSGL

SEQ ID NO: 34434 - protein, 11 aa, Homo sapiens
MKKKMLLYWIL

SEQ ID NO: 34435 - protein, 43 aa, Homo sapiens
MVLSQINHIIMIRNQGYKMRRKVMALELASFNCFGFLHQLTFG

SEQ ID NO: 34436 - protein, 32 aa, Homo sapiens
MLLSLPSAPATWIVSSPSSSFSAALFSTASGN

SEQ ID NO: 34437 - protein, 52 aa, Homo sapiens
LANPLPGSKCLQLGVSGALATSGAASCGPITLFSKRTCQRLGVLTAARTKVG

SEQ ID NO: 34438 - protein, 6 aa, Homo sapiens
MIVFGT

SEQ ID NO: 34439 - protein, 80 aa, Homo sapiens
LPACLPLCVCERVCVRLLCTGKNTAHVLCMDVTDTLFSLIFEKQARCPAHHMTPSILLLSAHFIGGIHHTWYSQSTESMR

SEQ ID NO: 34440 - protein, 16 aa, Homo sapiens
ILVIFFTITRIVLGIL

SEQ ID NO: 34441 - protein, 107 aa, Homo sapiens
KDQTASRKLHTMTPCLESFCQRAKDCKQNIPLPFLIQDWPLSESKPQGQDFWTPQPLQAAAPSHEFQQVALHPARTRLASRPQGGRLMSSREVGLRAPRCSCGKRKR

SEQ ID NO: 34442 - protein, 29 aa, Homo sapiens
INIYTLFILHTYFFPNNLQLRSEDTTNSA

SEQ ID NO: 34443 - protein, 11 aa, Homo sapiens
MVKVSAFLLFG

SEQ ID NO: 34444 - protein, 20 aa, Homo sapiens
LGWWGGLVWVQVGLIELVLC

SEQ ID NO: 34445 - protein, 16 aa, Homo sapiens
IAGMQMGSVLLTLAMG

SEQ ID NO: 34446 - protein, 43 aa, Homo sapiens
RNTAKSTGRSEMWMLLLHLRGHLSPAPPKMSCSPPERALHVTK

SEQ ID NO: 34447 - protein, 66 aa, Homo sapiens
LTLDIKGGIMWLLKPSAHSPVHILVLLFPRGWSQPGTHKRQILVNAASLPGGCLLPWIWSGAALRF

SEQ ID NO: 34448 - protein, 41 aa, Homo sapiens
ICALGPGLLLSLPSIGAQHPLPAHPSDSNSSPAPRPCVHFS

SEQ ID NO: 34449 - protein, 41 aa, Homo sapiens
IEFLWCSLACSSVFCISCSVMFKLRNALCGSSESHLWFSRH

SEQ ID NO: 34450 - protein, 36 aa, Homo sapiens
LAAAVQSLQLSFLWGIIHLSLSVMPFLTCHLTFSLP

SEQ ID NO: 34451 - protein, 11 aa, Homo sapiens
LTSILFIFQCL

SEQ ID NO: 34452 - protein, 33 aa, Homo sapiens
LFSFGAEPKNVHPLSLVLWCLLIFVFVLSIHLL

SEQ ID NO: 34453 - protein, 27 aa, Homo sapiens
MLAHLAADLLSPATLFLSRTFPLLCLL

SEQ ID NO: 34454 - protein, 16 aa, Homo sapiens
LFILGALWTLVIINQE

SEQ ID NO: 34455 - protein, 36 aa, Homo sapiens
VRGFGNHWICSIQKCFFESFSILSGVILPLQWISFL

SEQ ID NO: 34456 - protein, 78 aa, Homo sapiens
ITLSRLHLRLLLQPTFLSPEYISYPHLSLLFFPFFYMFKFKPFFVTPFLGRFMARTRRMMVLVRGCPVSLNFGVLCIK

SEQ ID NO: 34457 - protein, 115 aa, Homo sapiens
RTSASRWWIWRPWAGCWVRCCCWLSLASPSLSTSTMAPGSSAAVAKLRSPSPKALTTRRSSLTTRPTGRPSPAPRTTPSPRRHRCPQSPHPPALPPQAVPLSPPQRPELAEAPRR

SEQ ID NO: 34458 - protein, 37 aa, Homo sapiens
KNSPHQCRLPIRKWWLVWLMPWPTSITKLAFLLSNFY

SEQ ID NO: 34459 - protein, 31 aa, Homo sapiens
MNMLIGVELQRLLVFQVFLFIQLDTMMHRSS

SEQ ID NO: 34460 - protein, 38 aa, Homo sapiens
MCTWLQRQMKMIFIPAIMTTIQSMISRNWRMMQLFSKL

SEQ ID NO: 34461 - protein, 32 aa, Homo sapiens
ILAKRLRAVLAFAATWLGQLTQVSCLPSSACL

SEQ ID NO: 34462 - protein, 57 aa, Homo sapiens
KKNKLRTTLYVHLQMPQLMLVGCLSAFCDNEHMDFCLLNSVDPFSQLPGAWIFTSNC

SEQ ID NO: 34463 - protein, 55 aa, Homo sapiens
RHLALRPGYVSPRARVGLLPGPLAARVHGVPGIFRVFWHLPPLPGAHLPAPVRQP

SEQ ID NO: 34464 - protein, 32 aa, Homo sapiens
TALAFRACKSRDLGFVWDFLFFLSFFFSFCRE

SEQ ID NO: 34465 - protein, 45 aa, Homo sapiens
IQGFRFCLGFPFLSFLFFFFLQGVRRELGVSTSLPFGSCGKSPCS

SEQ ID NO: 34466 - protein, 77 aa, Homo sapiens
LAPRRSARSTNSTLSLLSSSLLFIFKFLFISPCVTTFFPSAPLPVPLPAPPPPCYPTLETTAVGRVPSSCQPHLLSC

SEQ ID NO: 34467 - protein, 59 aa, Homo sapiens
LWISLRDHPKRRKVTSHSCPLAALCRNASSAAKRPEPLGQSCPGKPGQPTPGSEGVSRE

SEQ ID NO: 34468 - protein, 21 aa, Homo sapiens
LDPCLPSERTALFLELGSDTC

SEQ ID NO: 34469 - protein, 20 aa, Homo sapiens
ITWTSIHLMYMVLMTSLVNR

SEQ ID NO: 34470 - protein, 14 aa, Homo sapiens
LLGFCLLLWRCSVC

SEQ ID NO: 34471 - protein, 16 aa, Homo sapiens
LGKEFLSFFSFFLSQF

SEQ ID NO: 34472 - protein, 73 aa, Homo sapiens
MISGPKKKMDKPGNESLQCDAITGNTRVEIGWAAFFSLEDFLSKSILSFHIFISFVRNCQNLEATMMPISFSK

SEQ ID NO: 34473 - protein, 56 aa, Homo sapiens
LSVPIPRLLHLTKGRMRETFLQIGAATFLSWSLGSGSQRALILRGLRPMEEEEEEP

SEQ ID NO: 34474 - protein, 53 aa, Homo sapiens
MLRYRGSGSLLCGPFLQSDFALLSSPHSPLHLPHQKREVGATTALSAQAPVSW

SEQ ID NO: 34475 - protein, 115 aa, Homo sapiens
VSRLAPARSGDRGARGRGEARTGLRWARELCREEGRRTMDWGWGMVGIPASANPSNGGAHRAVGSEGMFSPGPDRALSGFNLSWSSRHRFMKRYRCVHSSLELIRPPTPTSGKRF

SEQ ID NO: 34476 - protein, 28 aa, Homo sapiens
MTECDHASLWLAMVFIRWQVLPGWSESQ

SEQ ID NO: 34477 - protein, 63 aa, Homo sapiens
LSDMSSASMRTCPVQSTISTERYHQHILSLCCSKLGSTMMLAGSCLGGGWPPGHQESSTLIPH

SEQ ID NO: 34478 - protein, 46 aa, Homo sapiens
LRKQIMIVFCTCSFLVGSVCAKGRLISELRRELPVSKWPAGATLYW

SEQ ID NO: 34479 - protein, 91 aa, Homo sapiens
MTGCLLGGFSGLAMKALPEEKQSSISLFWRAVNVTRPINYLTEVLNFENESSGGEFCPFQPGELCQGSPERLFQLIKLARGPSLPPCRKCL

SEQ ID NO: 34480 - protein, 47 aa, Homo sapiens
MYIFIYTCTYISSTTFGSLSSCFSGLKPVLHDKSGLVTGDNCVLLGL

SEQ ID NO: 34481 - protein, 48 aa, Homo sapiens
MFSTSFLAANFSPIVFLLQQGEKVLCGPRRAVKLRVRGSVRGRMCVRV

SEQ ID NO: 34482 - protein, 54 aa, Homo sapiens
MWRQPQPPVFEEGDSDSDTGIMVTVEMDWKVRSPCPPRLQSSFFQGGNSPNLES

SEQ ID NO: 34483 - protein, 83 aa, Homo sapiens
VRSRGEGGVVLGCRNQGVFRKEDMPAVGFEGQVGGHQRPGQGRRGRHSQDGARPSKAQSHTVGQCCLCAIMPACLAVLLSDQK

SEQ ID NO: 34484 - protein, 18 aa, Homo sapiens
LVSMMLLIWLQKGQLRQP

SEQ ID NO: 34485 - protein, 34 aa, Homo sapiens
LRRPGVHVGLLSCPVFLVGMERSCVGPCCGLPKC

SEQ ID NO: 34486 - protein, 72 aa, Homo sapiens
MGCGVPAALQPHVASSSLSSGSRPVSAAELRELSVQHSLGPPWPVPSLSGAAVISSPSLSARDSSSSVTALG

SEQ ID NO: 34487 - protein, 54 aa, Homo sapiens
MLRGTHQWKKTSGWTWRGRQGSMPAEEHTTDAGRPPSGRTRRSLAGAVGGELGH

SEQ ID NO: 34488 - protein, 77 aa, Homo sapiens
LWAAFLTLDACGQPSSPWMPVGCLPHPGCLWAAFLTLDACGLPSSPWMPVGSLPHPGCLWAAFLTLDACDLVSMGAS

SEQ ID NO: 34489 - protein, 28 aa, Homo sapiens
MKRQAIDGENTQNNGSDRGLYLEYMKIF

SEQ ID NO: 34490 - protein, 43 aa, Homo sapiens
MVASLTHKGTRMANGQEGNPYGRWTEREVNVNISLGMPLSPLE

SEQ ID NO: 34491 - protein, 77 aa, Homo sapiens
LVIMWEWLPVHATGLQLHCLNGAMSHRGGRQGAGHLITRAVTSQGVEGGGGYGTPCLGCFCGACGLWAPTSMGLQEP

SEQ ID NO: 34492 - protein, 104 aa, Homo sapiens
LAQAGLSLMLGVPLWRWGSPSPCAAALHRPCRNNTSWTSSLGPRPGAGQAEEPSGQPCPQSCPPRASYPLPPHPRWPQTRQGSSCLRSPSLLPPSFSSSLSSHS

SEQ ID NO: 34493 - protein, 156 aa, Homo sapiens
VCLFAAVTMPFPSVLEWLLADASSPCSLLSNCNLNAPSGSPGISLRIFFLFLRQSRCDAQAIAQWRDLGSLQPPSGSRGSSTARNFLLLTQATVFCVAGLQEVRPALQATPVLGLLLSSSFLRVTEPGREVGCGLPCPYSRLLQLPPCWTHQQQSK

SEQ ID NO: 34494 - protein, 215 aa, Homo sapiens
VCLFAAVTMPFPSVLEWLLADASSPCSLLSNCNLNAPSGSPGISLRIFFLFLRQSRCDAQAIAQWRDLGSLQPPSGSRGSSTARNFLLLTQATVFCVVWAPAADIPHMSVCLLVGLTNSSTWSLMPNQVQTTLLFCVTLCEASCKLDSLPSAPSPKAGLQEVRPALQATPVLGLLLSSSFLRVTEPGREVGCGLPCPYSRLLQLPPCWTHQQQSK

SEQ ID NO: 34495 - protein, 38 aa, Homo sapiens
MHTASMHVSHTLATLAASALQSPSPRPLVGSLVHTGGK

SEQ ID NO: 34496 - protein, 52 aa, Homo sapiens
VVFPAPQTPAGSSRAELRADKARSERPLTGARPLLRALAMMCGSSLLLLGNC

SEQ ID NO: 34497 - protein, 115 aa, Homo sapiens
LNSVHAGLELRPCVFSRLLIRRGALGAPAWVAVPSVCGPQFLGPRRGFVGAPGDIWAVLAVSGSRARSLPGLTAADLVLHFLGGAWTLALRGRPVPRSVATDPRTLFAGDSRSLR

SEQ ID NO: 34498 - protein, 83 aa, Homo sapiens
LNSVHAGLELRPCVFSRLLIRRGALGAPAWVAVPSVCGPQFLGGAWTLALRGRPVPRSVATDPRTLFAGDSRSLRLPRMMACD

SEQ ID NO: 34499 - protein, 123 aa, Homo sapiens
LNSVHAGLELRPCVFSRLLIRRGALGAPAWVAVPSVCGPQFLGPRRGFVGAPGDIWAVLAVSGSRARSLPGLTAADLVLHFLGGAWTLALRGRPVPRSVATDPRTLFAGDSRSLRLPRMMACD

SEQ ID NO: 34500 - protein, 154 aa, Homo sapiens
LTIFLLLSSLSSYLAYLSIHLRVCLQPPPVCPSVQLPVTLCIFLSIHLPTHPSLRLPTSRPSPPGLQSHGPGLRGHGQPSPAGSGAGAGCHCAGCGPLSTPGPMWPPGLCPRCCCRRLQGLLGYWTVSETWEEAGWPLAASPSWRRRVCVCVCE

SEQ ID NO: 34501 - protein, 83 aa, Homo sapiens
LKKFFCLCLPSGTLPWRHRGPRAKALPGHLQNTPCVCVCVCVCVCVCVCTLQPPRWRGSVWITVNALPHWSVGDTVTNPLKSW

SEQ ID NO: 34502 - protein, 37 aa, Homo sapiens
VRGAASPRLATCGFYLLAILLCGRVVLTLHPRGPFLA

SEQ ID NO: 34503 - protein, 33 aa, Homo sapiens
MTTDARVSQPIAAETFPERQNIQLTHGLMGDHG

SEQ ID NO: 34504 - protein, 29 aa, Homo sapiens
LTSWVPWLIPCLVLDMSALSGPQFPPFAE

SEQ ID NO: 34505 - protein, 12 aa, Homo sapiens
MFGGLSLTAFLA

SEQ ID NO: 34506 - protein, 31 aa, Homo sapiens
LSRVGNTGRLLSFTLPSFQTCLMVATWFLNN

SEQ ID NO: 34507 - protein, 52 aa, Homo sapiens
MEGCLLSTLSTPSTTSAASPGCSLSSLRSSIPWVLRSSRLWSKHFSPTISQW

SEQ ID NO: 34508 - protein, 64 aa, Homo sapiens
LPLYPLHRKWAGSGLLVFAAPAARAQQGPGEMATVPAPGRTGERALPPPHVSARASFLGSTLWM

SEQ ID NO: 34509 - protein, 16 aa, Homo sapiens
LRLLIGASFLGSTLWM

SEQ ID NO: 34510 - protein, 11 aa, Homo sapiens
LASFLGSTLWM

SEQ ID NO: 34511 - protein, 169 aa, Homo sapiens
LRPGTCKFAGAASQAPHAPAFLRARGEPQDPLSHPRVPAVSANCRMWKHLPVHSSPTPRLTPLWKLQARWLLPQLVYLQGWGSYSLLRPAALISMVLLAREFLYPAKMSVSEVCSSGLSSPLLEQHKTNLIFYASGDICSANGKSGFNQPLPFLKTFCCTHRILSCTYL

SEQ ID NO: 34512 - protein, 87 aa, Homo sapiens
LSYLHHRGGALAPDEETEARERKCWLAWCHAEGLRGQSPVGPRTLLLVGCFSPLLRLGNPFPHLHGAGVSGPGLSWLTAALGARLAG

SEQ ID NO: 34513 - protein, 99 aa, Homo sapiens
MEPPPPPTHASLFLLFPPLFVCSGLNVGSMPGPAPPQSPGHSFPSSSLEGRGQRPQEAKGLQSPLVLTHSDGHWYSHRSPSMPRTGLGPLQPGLGAALR

SEQ ID NO: 34514 - protein, 44 aa, Homo sapiens
VGLCRLLCLVRLFCCSSILYQRQERGVKSLFYPPNKLSHSEAEA

SEQ ID NO: 34515 - protein, 79 aa, Homo sapiens
LVSCPLLFLSQLLGHLVPTTATLWGRPPSPRVTLKPTTSLSLPGLKGDAGFRRQEAGPLGVAGERECISLATGGLLLLA

SEQ ID NO: 34516 - protein, 50 aa, Homo sapiens
LGHVSCLIACWSCKQALSSTVPVPCPNLAPSKYRRPSFPPFSILLSVLSG

SEQ ID NO: 34517 - protein, 71 aa, Homo sapiens
MTTTSLCHHTYPLHTHTSQIPPPTTFFLSTLSHRPVWYLWSILSVCVCVCVCVCVCVTERERESLCVCMQG

SEQ ID NO: 34518 - protein, 100 aa, Homo sapiens
MLTEQHALLAPACTSASRAASELREDPAGAPSSAVWGAEVWRSWGAAMQIPTYPAGPEARGSQAGWEQGLAWEVWGTDKDDGPLRGKTRIRDRSGGPGHG

SEQ ID NO: 34519 - protein, 59 aa, Homo sapiens
MPLHTLFSPPATFSPLLLPLQTPMQPSRPHSPLESLPDPLGNNHHQYLFTEPTLCQALF

SEQ ID NO: 34520 - protein, 89 aa, Homo sapiens
VVVVGLGHPFLVLSLVMGLLLWPLDQLGTGGLQASVSLSVCVSSLHMASLLPPPGRPPGLHHLPYPEALWAISHPPSYSLTPSIHLSHL

SEQ ID NO: 34521 - protein, 93 aa, Homo sapiens [sequence omitted]

SEQ ID NO: 34522 - protein, 83 aa, Homo sapiens
MRRLDSFCRPQGRGRCQPPGMSLPEPQMPQAIWTPPVQYLCYNKMYPDLSPLTWATANVPCGPIPRPQEPRGSFFLKIFRPHR

SEQ ID NO: 34523 - protein, 23 aa, Homo sapiens
MEFAVLPRFGVNLLTHGEEGHFP

SEQ ID NO: 34524 - protein, 219 aa, Homo sapiens
MWPRPRAPPETSGAHRGLGKILRDLTAQVFHPWPPPQVMPEAQGTVSTLRPCPWLWIGGPHQRPGLSPQGSTQVLWAAWGGAGWTPRWPVFATWPWVSSSLEETLPQTPAGHPAKPLRPGKVSGCHPTPRPDSSPCGSWTEHSVTTKRSLPRPCLHPGKTQPGMGRRNAARLPAQTRVAPHARPGPHPPGAHGSPRLPGRKSPPPQKGWSLVGSCCWVG

SEQ ID NO: 34525 - protein, 63 aa, Homo sapiens
LGGGRSLRVSSFKTKNILRSLRMEFLFFLLLFPSYNQLKTQMAFCKGTLGGVFQNAIPSEQIA

SEQ ID NO: 34526 - protein, 80 aa, Homo sapiens
LRCCLNSFSLQGKGRDLHWGLTGVSGFPKTSPSWLPPRHGPAMHPPSHHVPRMNVLYTFNPPLVWFLGVGEGFLFVCLFS

SEQ ID NO: 34527 - protein, 48 aa, Homo sapiens
MAAGVIFSVCVFRKAAVSCLSTKTQCHLLLLFLCHSRTSADLSHRLPV

SEQ ID NO: 34528 - protein, 55 aa, Homo sapiens
VPRPQASFTAVSSHRAVVSALPISSFYVGVLNVCFFPFKSYKAKTFWLIPFCMVV

SEQ ID NO: 34529 - protein, 96 aa, Homo sapiens
VTTHKGSHCLEGCRPQNFHSRGSWNPGNPLLKFGRRSMPLVSPSQGAILNPIFGRHTYFTVSKAIYSAKQHPVLFQTLNDSILFLFFYVFMVAVCV

SEQ ID NO: 34530 - protein, 55 aa, Homo sapiens [sequence omitted]

SEQ ID NO: 34531 - protein, 68 aa, Homo sapiens
MWSAAPLGHLSPASTPPGTAASSPTTQHPGKWSRSWWPLGSRPLASVPSTTWAPTPSASPSSSCSALS

SEQ ID NO: 34532 - protein, 230 aa, Homo sapiens [sequence omitted]

SEQ ID NO: 34533 - protein, 40 aa, Homo sapiens
VGPLGRLLWCWAGVPGAAAVPTSVCWGRAPWRENMEPLLA

SEQ ID NO: 34534 - protein, 11 aa, Homo sapiens
MVAVGWTWLMG

SEQ ID NO: 34535 - protein, 23 aa, Homo sapiens
ISLLSLSLFFFFFFFFFLLKKKP

SEQ ID NO: 34536 - protein, 29 aa, Homo sapiens
MNLASRPCFSLFFIHIHSQHLRRCCLIYF

SEQ ID NO: 34537 - protein, 51 aa, Homo sapiens
RSRHHGFLQSSAGGASTLGLPAARGQGLQCAPLHFPAHSWGQSGAGRSGRG

SEQ ID NO: 34538 - protein, 43 aa, Homo sapiens
ITISSNSSSKHNSISCFLLLSFLILSKFSDSRKRNHSPLPPTT

SEQ ID NO: 34539 - protein, 54 aa, Homo sapiens
LTSVYLRVRPILPAGLCLGVTLPELAPTTVATVMLMCDCCQEPAHMTVWRKFFP

SEQ ID NO: 34540 - protein, 43 aa, Homo sapiens
LLSQDCESGLGFSSLHSTAALVIATCLLITEESQVLRRGRNTH

SEQ ID NO: 34541 - protein, 7 aa, Homo sapiens
ISLLTLL

SEQ ID NO: 34542 - protein, 26 aa, Homo sapiens
KVTCLFPLFPDGAFIIVLFAFCFVLF

SEQ ID NO: 34543 - protein, 37 aa, Homo sapiens
ITHLPSSSIIAKIPSLHILWVSASVLISLHTPSAFLS

SEQ ID NO: 34544 - protein, 40 aa, Homo sapiens
MPVFLPWTLSSADSPRPARALLYTTGSGAGVEPGGRPLPS

SEQ ID NO: 34545 - protein, 7 aa, Homo sapiens
LGCFWLL

SEQ ID NO: 34546 - protein, 9 aa, Homo sapiens
LGYKWLLVI

SEQ ID NO: 34547 - protein, 47 aa, Homo sapiens
KTWTIEWSRNSPLSLTITVAFLWSSSSPRIPKTAAEFIKIKFVNVTT

SEQ ID NO: 34548 - protein, 43 aa, Homo sapiens
KPLFLSPLPTLPPLTLLLTLLEPCLPGGPISSGRPCLWATWSV

SEQ ID NO: 34549 - protein, 80 aa, Homo sapiens
KATLAPRRSARSTNSTLSLLSSSLLFIFKFLFISPCVTTFFPSAPLPVPLPAPPPPCYPTLETTAVGRVPSSCQPHLLSC

SEQ ID NO: 34550 - protein, 18 aa, Homo sapiens
LSRITLTTTSALLLGHLL

SEQ ID NO: 34551 - protein, 22 aa, Homo sapiens
TRGEVLSAVALRLLALISRLPL

SEQ ID NO: 34552 - protein, 28 aa, Homo sapiens
LSLHWCASGQAALLGPGPCLPTPPPSWA

SEQ ID NO: 34553 - protein, 15 aa, Homo sapiens
LRRGFTMLLWLVSNS

SEQ ID NO: 34554 - protein, 11 aa, Homo sapiens
LTLSLCCLLLS

SEQ ID NO: 34555 - protein, 184 aa, Homo sapiens
VSPRKVWAAFLTLDACGQPSSPWMPVGSLPHPGCLWAAFLTLDACGQPSSPWMPVGCLPHPGCLWAAFLTLDACGQPSSPWMPVTWFPWGLPKLRDPKPPSNLMTRLVSEHTCVVPEPLTNPLCNPAHAFPILKGPAHRPAHVFPLPLLCPYLVGSCPFWALVWHFTHKCVLWVVSGPPPAVRG

SEQ ID NO: 34556 - protein, 50 aa, Homo sapiens
MNRHVAAIGPRFKLLTLGLSLLHADVVPNATIRNVLREKIYSTAFDYFSP

SEQ ID NO: 34557 - protein, 80 aa, Homo sapiens
MGHCCVQNPGSSFCLQLLSLDAPETIQASFPILPLCFAFYPSTSITAFSSFQNSLFLVLFFMITKLLLPPWKITAIDACM

SEQ ID NO: 34558 - protein, 86 aa, Homo sapiens [sequence omitted]

SEQ ID NO: 34559 - protein, 74 aa, Homo sapiens [sequence omitted]

SEQ ID NO: 34560 - protein, 33 aa, Homo sapiens
LRLRLLLLVLGNPSGTGKSKKEAKTSIRSLTQK

SEQ ID NO: 34561 - protein, 136 aa, Homo sapiens
LSLFSAGPRWQLLASGLPSASLWDLCLPGISCLASAGGASLWGRSLPPALSSSPEAAALPGWAQEAPCRHMMGRGCPYPPPRGYSPVSGHVSPGLSPGCWFLFCGAQTSVKHTDVGKMKNCGPTGLNPMDGGIFIQ

SEQ ID NO: 34562 - protein, 38 aa, Homo sapiens
MANLAALSLCFLLFSFLPLFPTLLSSLQSTTCTPGAPG

SEQ ID NO: 34563 - protein, 94 aa, Homo sapiens
LGKGLLGLLVNFCGHHLLLLTSLGGCYQFCPGPFSFISWFPAPSVLTSVCHMRREALPVWEGGYCGWNSGGLQLIRQGPPTSWRASALLIKMSM

SEQ ID NO: 34564 - protein, 49 aa, Homo sapiens
LPSLFGPRSVHAFVFVTAAGPFDVFICMGWKNHRESPFSSLKKFHDSNI

SEQ ID NO: 34565 - protein, 15 aa, Homo sapiens
LNFYGHGTDKDPVFI

SEQ ID NO: 34566 - protein, 44 aa, Homo sapiens
RTARQRCVCEDVLHLLLCASQLLLLKQLSLLFGFLRLLASERHL

SEQ ID NO: 34567 - protein, 31 aa, Homo sapiens
MWRIVRLQQLLVNWSMLILVLKKILRIYTLL

SEQ ID NO: 34568 - protein, 33 aa, Homo sapiens
RNPTPADLGLQEFVVYVCGGAAASVLSAAWDTG

SEQ ID NO: 34569 - protein, 64 aa, Homo sapiens
RLIKEHTKIGGMKHLQNCPNGPSGDPGNKCLSSHDQSFYFFLILCIWLVYMSQNQVLKQEVIQK

SEQ ID NO: 34570 - protein, 69 aa, Homo sapiens
REEMEITSPDLAFLSLFLFSPLPSDDWRVKGNPERGGEQRFEKMQECVWRRVKLPFKLWPPGTRCSAAG

SEQ ID NO: 34571 - protein, 111 aa, Homo sapiens
LKEDKIVFITKNMCSVRIRMFNCVKVGDGKIGIMAWIQKSVFHYRKWEFKDDQKTVGSRVRIRTLNCCLTFQITKKFFTMSRTLNLKAEWIESLQRGSGMVFDVGKGNMYF

SEQ ID NO: 34572 - protein, 24 aa, Homo sapiens
MGPVCRSVWAGCGSILHLPTLSCW

SEQ ID NO: 34573 - protein, 12 aa, Homo sapiens
MRKRLLWELLML

SEQ ID NO: 34574 - protein, 18 aa, Homo sapiens
IQTAGASLTAYGTNHAPN

SEQ ID NO: 34575 - protein, 29 aa, Homo sapiens
MPAYLNDTRMTFKAHLKMGKPQHRIRLGP

SEQ ID NO: 34576 - protein, 41 aa, Homo sapiens
IPVGCDLLLLAMVVRPPQLCGTIDEEPTKKSLRIQHTLSQT

SEQ ID NO: 34577 - protein, 49 aa, Homo sapiens
RELPLTDTDNSKGTWSSLCLIVVGHTAQEEPAMRPANALTISLSHQEEA

SEQ ID NO: 34578 - protein, 28 aa, Homo sapiens
KPPPMSSTREACLWALAWTLAGREARGF

SEQ ID NO: 34579 - protein, 30 aa, Homo sapiens
KRTKTCSLLPVDFAGLLLSCGLLSGSVFPL

SEQ ID NO: 34580 - protein, 110 aa, Homo sapiens
MPCCKGWGASVWLPCHHKTCGFQLCLHPGPTNQQQERKQLCTQADAHTRTWPPRRAQPSEEVEHQMFWVSCSTLPQLVESVVVVCLSRAHVRDKSWADGKPLLSAPTPQL

SEQ ID NO: 34581 - protein, 118 aa, Homo sapiens
MGTRRTPWELTFLSSLRSGAPTHAGRVFMAFPGQSDTKMQWPEVPALPLLSSLCMAMVRKSSALGKEVGRRVKEMVMLVAPFRQSSSLSRTFSSRKVVKAHASLHGARLSPLSRNIRG

SEQ ID NO: 34582 - protein, 45 aa, Homo sapiens
MGRQWMTYLWRETTHSRTSSLLKAEHSMGRPVCREEPATPGSPFC

SEQ ID NO: 34583 - protein, 40 aa, Homo sapiens
MRRSCSIQRLWKRVPGSSLFQRQTSSLCLHSRMTNYNDYT

SEQ ID NO: 34584 - protein, 18 aa, Homo sapiens
MCLGWFFFFFSISLRRFP

SEQ ID NO: 34585 - protein, 28 aa, Homo sapiens
MIATLLPAHTTQRGTGVMGESFKPTHQA

SEQ ID NO: 34586 - protein, 43 aa, Homo sapiens
MAIYNSRKAASEETNLQTSLSATPCLPNGVKRQKGNEFPRRPA

SEQ ID NO: 34587 - protein, 40 aa, Homo sapiens
MDPTAMLARHLAAIVFLLFTPKQMVYNEELTFLCSQAKDL

SEQ ID NO: 34588 - protein, 27 aa, Homo sapiens
MRAYRMGGGPRRGTIIAKTRGPEEETF

SEQ ID NO: 34589 - protein, 66 aa, Homo sapiens
MPIAAPVPVTWGVAAEGTAAWDSRELGSLSSLQGHHFLWALGQVTVLSESQFPHLQNGNNYPGLPT

SEQ ID NO: 34590 - protein, 21 aa, Homo sapiens
MFLLIPLIKQGHFARVLMGNH

SEQ ID NO: 34591 - protein, 83 aa, Homo sapiens
MSSRHLSALWISSATKCQRVWRLILPSLLQSRTRDSRKLLLHRSPTVPASVPVHTGSSRGLWLPTNSICKWSISLHLYCLTII

SEQ ID NO: 34592 - protein, 33 aa, Homo sapiens
MEVPPRLGRVRSHQDAQRVSLILSQVVELSKPS

SEQ ID NO: 34593 - protein, 84 aa, Homo sapiens [sequence omitted]

SEQ ID NO: 34594 - protein, 16 aa, Homo sapiens
MQYQSLHGTISTTLRS

SEQ ID NO: 34595 - protein, 11 aa, Homo sapiens
LMWIQTFLSVL

SEQ ID NO: 34596 - protein, 57 aa, Homo sapiens
KKARRSSFHLAGRATCRLRAGGTMSTRPPMRPPGNVPAVLLGFQPALALTGALCLQQ

SEQ ID NO: 34597 - protein, 16 aa, Homo sapiens
VHWAPSSLILCFPLLG

SEQ ID NO: 34598 - protein, 44 aa, Homo sapiens
MCSWSFVLRTAPMSTCLLRITALCSAARMPMEWSCTMRLSSMPK

SEQ ID NO: 34599 - protein, 56 aa, Homo sapiens
RRQPLAFQRVLLSLCLLEGIWHSPAAAAGGGSHCSSWPSLYTTFQRVSLLELDLGL

SEQ ID NO: 34600 - protein, 42 aa, Homo sapiens
RVLLSLCLLEGIWHSPAAAAGGGSHCSSWPSLYTTFQVRSCP

SEQ ID NO: 34601 - protein, 40 aa, Homo sapiens
RVLLSLCLLEGIWHSPAAAAGGGSHCSSWPSLYTTFQVSI

SEQ ID NO: 34602 - protein, 21 aa, Homo sapiens
REDLDHGGRGWRLCRVQRYHL

SEQ ID NO: 34603 - protein, 41 aa, Homo sapiens
MLALHSILQWPPLLQQMQSFASTCSERWMTIKEMEMCSFPL

SEQ ID NO: 34604 - protein, 15 aa, Homo sapiens
RLIKWFKYFCCCVLS

SEQ ID NO: 34605 - protein, 19 aa, Homo sapiens
ILMEIKWRTPLTLSSMLLT

SEQ ID NO: 34606 - protein, 32 aa, Homo sapiens
MRDGTHPRGMLLQSFYRASAVAHACNSCTLGG

SEQ ID NO: 34607 - protein, 31 aa, Homo sapiens
MPSTCLTVQGGMPPNASAKLSVPLWSASLTP

SEQ ID NO: 34608 - protein, 35 aa, Homo sapiens
MMPRKRRCCPTWGPILAATWSRQNRSVVSGRRGGR

SEQ ID NO: 34609 - protein, 16 aa, Homo sapiens
VSLFMILWIAVSRETQ

SEQ ID NO: 34610 - protein, 18 aa, Homo sapiens
ILIFLDCMVISMMLPEST

SEQ ID NO: 34611 - protein, 40 aa, Homo sapiens
IKEMALMWTNGIILPGTAIILESKIILITSALLSLPVSVK

SEQ ID NO: 34612 - protein, 36 aa, Homo sapiens
RTAWHWLRVFLRVESGMTYDTCTAWLCLTMMQSATW

SEQ ID NO: 34613 - protein, 42 aa, Homo sapiens
KNSNKEKMQKWFAELAVHLHLLSAGCIIMRKSPLFPTIGSLC

SEQ ID NO: 34614 - protein, 10 aa, Homo sapiens
MGPCLLFFLL

SEQ ID NO: 34615 - protein, 32 aa, Homo sapiens
LCPLGWKGQDSAAAFAFLFLNFIVLISFLPNR

SEQ ID NO: 34616 - protein, 15 aa, Homo sapiens
LGLLMIVVLRLAEDL

SEQ ID NO: 34617 - protein, 130 aa, Homo sapiens
LLLMIAMTLRLMNSLAKRILDVEDRKSLWGQADLDSNTSQFCLLCLSLSLLICEEEVARMKMPALWFVVRTDTANVEGPAAHRPVALRADHSCLDGRELFLCVASGTLGRKATVRLLRRTLHKGVSSQGR

SEQ ID NO: 34618 - protein, 37 aa, Homo sapiens
LRENLKILLGGLLALRYRWGMSSSFPAIKAMTRESEY

SEQ ID NO: 34619 - protein, 68 aa, Homo sapiens
MSHMVPLALLLPLFPTSRRAALPFLPLFFGLMFPATTDLPPPHPSADLAVHCRHGGLISDRKLRLSER

SEQ ID NO: 34620 - protein, 12 aa, Homo sapiens
LGPVLRLILCFS

SEQ ID NO: 34621 - protein, 17 aa, Homo sapiens
ISSSITIRLILILFHGH

SEQ ID NO: 34622 - protein, 15 aa, Homo sapiens
LETLLSLLRSLLMLA

SEQ ID NO: 34623 - protein, 62 aa, Homo sapiens
ILPAEQSQPQSRLASRLQLESESQRHGLVRVLCKMSGRGPLCFPGGHWIVFLWGGTVLWLWT

SEQ ID NO: 34624 - protein, 32 aa, Homo sapiens
MPECMVFSHGMLSLARFVAPTFCPSAKQLSSK

SEQ ID NO: 34625 - protein, 8 aa, Homo sapiens
LVLLMWCM

SEQ ID NO: 34626 - protein, 14 aa, Homo sapiens
KPRTKWMFMVMLSS

SEQ ID NO: 34627 - protein, 19 aa, Homo sapiens
IMVYLWLAMVILMGKNTGL

SEQ ID NO: 34628 - protein, 42 aa, Homo sapiens
MAKAGSIFIIILTSTFQKPHSKTAAPTSAGGFLGVKMCLQRL

SEQ ID NO: 34629 - protein, 9 aa, Homo sapiens
ILGLLLGFT

SEQ ID NO: 34630 - protein, 47 aa, Homo sapiens
LKPTVLGFLACGISLVGLHTKPCRSAAFPDSPVLSECKGLPCRRCVL

SEQ ID NO: 34631 - protein, 8 aa, Homo sapiens
LLFLILLS

SEQ ID NO: 34632 - protein, 38 aa, Homo sapiens
IQNQNHSPSEELPNVRFSYRILFSCLGAACLCFSWRSS

SEQ ID NO: 34633 - protein, 12 aa, Homo sapiens
IDTWLLSMLCLL

SEQ ID NO: 34634 - protein, 25 aa, Homo sapiens
RRSMKTKNMLVLLFSQNSLQELRRH

SEQ ID NO: 34635 - protein, 12 aa, Homo sapiens
LCVFFFSFFPSM

SEQ ID NO: 34636 - protein, 13 aa, Homo sapiens
LDLLFVSSMLYIM

SEQ ID NO: 34637 - protein, 25 aa, Homo sapiens
LDMMILMSPTVLSTLSHVLLQLPAT

SEQ ID NO: 34638 - protein, 75 aa, Homo sapiens
MSSAGRWNIARFSLAWYWLPFSRKCARAVWSWIQPPWLASLSLMSLPLCSLLWESSALLDMRLEGCLGLPTHKLC

SEQ ID NO: 34639 - protein, 69 aa, Homo sapiens
MGQIYTRTKNLPCKFIIECARAVWSWIQPPWLASLSLMSLPLCSLLWESSALLDMRLEGCLGLPTHKLC

SEQ ID NO: 34640 - protein, 19 aa, Homo sapiens
TLFFLKKYTSCLLYFALGT

SEQ ID NO: 34641 - protein, 10 aa, Homo sapiens
IWLNYLSLIC

SEQ ID NO: 34642 - protein, 17 aa, Homo sapiens
LSTCWLSLVAALWDCVK

SEQ ID NO: 34643 - protein, 52 aa, Homo sapiens
KQDSKEHLCVFYRLPIIVLGRKKRVRNKTSFHCPARFCGLVLRPRSLCWKRW

SEQ ID NO: 34644 - protein, 11 aa, Homo sapiens
IVLLIQFCTVL

SEQ ID NO: 34645 - protein, 141 aa, Homo sapiens
VKEKPRILLLFWIIFYRRDHRNQSLLPRPALLGFGRGTHQPLVFYFFKKPSPEQPKIPLRWGPTALWWPFGENCSPARQLGPECNPSSTPAWRPGPQPWPGGQASPCGALKEGGHEPTPHPSANRGMAPSAFPVPVSNPTQ

SEQ ID NO: 34646 - protein, 55 aa, Homo sapiens
LWPVKGAHMCQSTLMLLWRTLPKVRAARYPTSLNLILSTAASSLFLPCCERSNYS

SEQ ID NO: 34647 - protein, 21 aa, Homo sapiens
LQWPFMWLAVSLVVTSTQLCL

SEQ ID NO: 34648 - protein, 10 aa, Homo sapiens
VMGSWWLVVI

SEQ ID NO: 34649 - protein, 27 aa, Homo sapiens
MGPRLALISVGSCVASTWTKMGRQSCC

SEQ ID NO: 34650 - protein, 33 aa, Homo sapiens
LRSTRSAAVHFFRALTQGTLVLVGDGSSFPISA

SEQ ID NO: 34651 - protein, 58 aa, Homo sapiens
LSVAMAMFLAGCGGPLLNDLLPCCSEDTAARKGLAHCGASQGTLVAPASDLVLSLVWG

SEQ ID NO: 34652 - protein, 38 aa, Homo sapiens
LRFKSLISSLFLLQDPEALSLSPWSSAGPWPCWGAPWA

SEQ ID NO: 34653 - protein, 24 aa, Homo sapiens
KQLNMFMALLYIGTWTFWLQPKPP

SEQ ID NO: 34654 - protein, 10 aa, Homo sapiens
IYKILVCLAT

SEQ ID NO: 34655 - protein, 15 aa, Homo sapiens
IQVYQIMHFCMVYFL

SEQ ID NO: 34656 - protein, 17 aa, Homo sapiens
ILRTLIMVILAWTPVNS

SEQ ID NO: 34657 - protein, 8 aa, Homo sapiens
ILSWSFLM

SEQ ID NO: 34658 - protein, 13 aa, Homo sapiens
ILSWSFLINLIHW

SEQ ID NO: 34659 - protein, 37 aa, Homo sapiens
VYIMSLSSVTRFTMMLRVLIMTMMPSWVLKKQRPLIS

SEQ ID NO: 34660 - protein, 22 aa, Homo sapiens
IYLIYRLCLMGLLPTKKGPIIS

SEQ ID NO: 34661 - protein, 13 aa, Homo sapiens
IPHHTVPCTAKEL

SEQ ID NO: 34662 - protein, 23 aa, Homo sapiens
MSCSLQFFPLSALPSSGYWFFPS

SEQ ID NO: 34663 - protein, 15 aa, Homo sapiens
MFWCCVLTLKLTNIL

SEQ ID NO: 34664 - protein, 28 aa, Homo sapiens
IWLCLTSWDPMCLICCALVFHGLLKLHL

SEQ ID NO: 34665 - protein, 8 aa, Homo sapiens
IISLVLIL

SEQ ID NO: 34666 - protein, 22 aa, Homo sapiens
IRLSLAFILILDGLLFWVPSGC

SEQ ID NO: 34667 - protein, 32 aa, Homo sapiens
IKTVLSTMTGTASRLAGSSALGFCAPWASSSS

SEQ ID NO: 34668 - protein, 37 aa, Homo sapiens
LVKVIASLFCLKPSVAAHHTRIKWKLLTIGSSLCPPL

SEQ ID NO: 34669 - protein, 49 aa, Homo sapiens
LFVIKRGQRSLTHRGTWGGTVLLAQACQRLVTVGPPPFGLTPRPPHEWY

SEQ ID NO: 34670 - protein, 30 aa, Homo sapiens
VSSLPLLFLVSCAVPSGTWAGEDTAPSRFL

SEQ ID NO: 34671 - protein, 98 aa, Homo sapiens
VGGTVQISRAGQLAAVTSVGNMSVYPLALMTPPPTSPPLPPPPPPVGGGQWDLGIFHLLCPVVLKSACGAVFYVYPCLLKTKYWFGDNFHVLLFYLPS

SEQ ID NO: 34672 - protein, 21 aa, Homo sapiens
VGVTCLVASFHVCLCLGHGLC

SEQ ID NO: 34673 - protein, 88 aa, Homo sapiens
LENHVLCSKNLRTRVLIPRLEGTWLSHVGLSVVFVIILQQDHFSKTVLFKLYSFKFFYSPFPEIFVYIVLSNGIFELIVLIRAGTYFQ

SEQ ID NO: 34674 - protein, 38 aa, Homo sapiens
LGTGVFLFAVLPSAGSSVLFPLEKYLCAPEPNFSQMHI

SEQ ID NO: 34675 - protein, 73 aa, Homo sapiens [sequence omitted]

SEQ ID NO: 34676 - protein, 24 aa, Homo sapiens
MVTGTPVHCFDLKIEVHYSDRKLI

SEQ ID NO: 34677 - protein, 29 aa, Homo sapiens
MRNGVFWPVLGCSEFKRMREWTVALRIFI

SEQ ID NO: 34678 - protein, 12 aa, Homo sapiens
LGPELTEWAATD

SEQ ID NO: 34679 - protein, 35 aa, Homo sapiens
MVEPVPGCKASWDARSSGWKAGLEFSLGRWVTSVH

SEQ ID NO: 34680 - protein, 45 aa, Homo sapiens
VGVSPGHIELSRGTLFPWLHGPEDARLSPLESVFRRPRGERKVLG

SEQ ID NO: 34681 - protein, 28 aa, Homo sapiens
LSLSALSVTVCPSWLVIYLLWSVHPTMC

SEQ ID NO: 34682 - protein, 96 aa, Homo sapiens
VSLPAPCHALARTAAVTLVTTASAVIHAHVPSVYMSFGCQDSSWGEGWEWRVAGRSKALWRGLGPGPQQPGWLYVASDTLIPCPELRFWVGLQPHD

SEQ ID NO: 34683 - protein, 67 aa, Homo sapiens [sequence omitted]

SEQ ID NO: 34684 - protein, 175 aa, Homo sapiens
LAAVNARFGNRKVEREVLGSASISVALFSPSWYSPPNLGFLHARVASCSTSLSLILVSTSSPGKFPFSRLALPTRASDFHPSFSLLASDYPPPIPPRPAAQLPPPFTRTGTIIPTPLRPVWDSTCLLPNPTLISAWSLPLWPNLSSRLIGDGHSHSLVPNTSSWMDSRHPCPLFN

SEQ ID NO: 34685 - protein, 45 aa, Homo sapiens
MEFKPKEWRVPDERYVRSRVRSKLDALLGWQVQNVPDPSVPAWIS

SEQ ID NO: 34686 - protein, 27 aa, Homo sapiens
LARSFLFSFHLLFISSETHALVLAFGP

SEQ ID NO: 34687 - protein, 30 aa, Homo sapiens
MGFYIWVCVSVCVCVIFFLNLCCGKVTTKL

SEQ ID NO: 34688 - protein, 65 aa, Homo sapiens
LLFFPPATVQGRRYFSRLSLMGAFLLATSLKWNLLVALLPLQLWCYTEKLEVSKQTREKEKHQKV

SEQ ID NO: 34689 - protein, 72 aa, Homo sapiens
LLLETAAAAAAAAARGLPAAGAEVLAARAPRPLPTARRDAHSPSTRKEVPSPVTGSCRVQIYTELHNQPKTT

SEQ ID NO: 34690 - protein, 98 aa, Homo sapiens
LTLSYPFCAKMDSIGKMIPQLLILWLYIALETLKHQMELNTYLKFRLGNIGEEASKRGKHLLSGRIFSILWISLIFFYHPEGWWELSFCYILEVIQDF

SEQ ID NO: 34691 - protein, 50 aa, Homo sapiens
VPPCLTNFCIIFVETVFCHVGQAGLELLDSSNLPSVASQSAGITDTSHLT

SEQ ID NO: 34692 - protein, 31 aa, Homo sapiens
IANLFLTSAWACFFFFFFFFARKHIDEPQEI

SEQ ID NO: 34693 - protein, 15 aa, Homo sapiens
LAVFFFFLQGISVST

SEQ ID NO: 34694 - protein, 33 aa, Homo sapiens
RRQRFLGFCLVLSLQKVLPVPPALGTRLCIASP

SEQ ID NO: 34695 - protein, 92 aa, Homo sapiens
VCISIVYILYTLLHRHTNAPIYTGQEHNHVIISTKELRNPARKDIGGGLALKLLFKTRKRRRKRKKRKMLGNIYLTCSTARTLASCCYSCKY

SEQ ID NO: 34696 - protein, 65 aa, Homo sapiens
IIQLFSFILLRATDSTEMETIRRLSIHLNKYLALTPPRRNSLMLWLIPWSMTSFMAKMVFFLHMV

SEQ ID NO: 34697 - protein, 40 aa, Homo sapiens
VAGLGMELSALCVGGLGLCLHPAQGCPSLGSPAWLLLGPE

SEQ ID NO: 34698 - protein, 45 aa, Homo sapiens
MVPLFHLPPLMNLWITQLCTGLPAAAVSVYLGSCPWLSGWDGTWT

SEQ ID NO: 34699 - protein, 37 aa, Homo sapiens
MWRTWMLSCFSSNGLRSRWPPSDLSDCVGAGPLVSNS

SEQ ID NO: 34700 - protein, 40 aa, Homo sapiens
MRVTASRPPSTIFSPSCLSTSLSSSRKLPTLTSCSSSFCS

SEQ ID NO: 34701 - protein, 33 aa, Homo sapiens
MTRTVPSFTAILNSPSTQHIQLNQSKSSFPAGK

SEQ ID NO: 34702 - protein, 46 aa, Homo sapiens
MVTRSLFFFVLSPRFRSIGGSESTVSLWIVSAETEKKSRDSPTPPS

SEQ ID NO: 34703 - protein, 42 aa, Homo sapiens
MEMRPHKPKKKTSICSSICLLWFKNFFNLTSRCVNCDIWECL

SEQ ID NO: 34704 - protein, 74 aa, Homo sapiens
MTIFHIFKTILVLLDLSRSPHHITQPLCPMGGQTVFQCRRKGCKVRAVCEEGTNESYCEKVCMVKKWITKNKAS

SEQ ID NO: 34705 - protein, 81 aa, Homo sapiens
MGTALEVTPLSSGIWIRWGLLQTSVLSRCDRRPLECSPGSSTGPSRWELRGNRGSQRGTWSTSPGPSTLPAFPALHWIKPV

SEQ ID NO: 34706 - protein, 23 aa, Homo sapiens
MPACCSVCCFLVSHLLTSWYNQL

SEQ ID NO: 34707 - protein, 40 aa, Homo sapiens
MVYVALWMLSPLFGDRAWSLSPGTSCQPHVVPCPLLAVAR

SEQ ID NO: 34708 - protein, 36 aa, Homo sapiens
MVSSWRSLSSRFQTALFFVVSSNGRKRGGCWRKGGE

SEQ ID NO: 34709 - protein, 154 aa, Homo sapiens
MAGAAPRRRASWGCAESVRDPGATCQAGLRGGEACLVPTAVWLRDSTLAPSRRLLGLSFLALHPMLAARSGFPSCLCLGRGSCEHCTEAKTLLQPLRWAVETRAFVILNLIQGLGVVVRSGPPPVLQERPPPSSVGQSLGHAPGVGRSSWVSGQ

SEQ ID NO: 34710 - protein, 75 aa, Homo sapiens
MPSQFLLPLGSSFPADSRSLSTQIKRDLLSGRGAGGSTQHDHRGSAGPSIVAAAAAPAAHPASHRLRPRALLHPV

SEQ ID NO: 34711 - protein, 18 aa, Homo sapiens
IALSSCAWILEKRTVLRS

SEQ ID NO: 34712 - protein, 52 aa, Homo sapiens
LESPAAVGLLLLLWLSLPVRLPSFVVSQRCAGLLLAALRIQGVGCQVQDLQL

SEQ ID NO: 34713 - protein, 83 aa, Homo sapiens
LKPPRLLPGKVVSPAELSPVPPTRAVCPWLQPLSPRSPRLPLRPPFSLDELASFLFSAMEFCSVLLALLSQRNPRQQMPIRSV

SEQ ID NO: 34714 - protein, 13 aa, Homo sapiens
VGRLPLLFPLSFL

SEQ ID NO: 34715 - protein, 45 aa, Homo sapiens
MMLPTMLFCLSNLKGPSALNSSPDHLILQGPRSRSWSHQNFWAKG

SEQ ID NO: 34716 - protein, 12 aa, Homo sapiens
MHWTTLLLILLI

SEQ ID NO: 34717 - protein, 22 aa, Homo sapiens
LVTLSLPPQRRRRDLTAKMTVS

SEQ ID NO: 34718 - protein, 57 aa, Homo sapiens
IAIYRSRRMDLLNDLALFSGPIYHIPFLLQIFLLSPFLWDLSCYIPSELTNAFTFFP

SEQ ID NO: 34719 - protein, 8 aa, Homo sapiens
ILTAVIVF

SEQ ID NO: 34720 - protein, 23 aa, Homo sapiens
LGASKIQRLAVSPGGKIVPISKM

SEQ ID NO: 34721 - protein, 16 aa, Homo sapiens
IYPPLLGALSFIAASS

SEQ ID NO: 34722 - protein, 10 aa, Homo sapiens
IFLLLSVLMH

SEQ ID NO: 34723 - protein, 47 aa, Homo sapiens
MSFTQKINSTWFLNFCTKISRNSWMPLLSLAFLFPSSRAICSSCSRA

SEQ ID NO: 34724 - protein, 47 aa, Homo sapiens
MAMSSMTSTSGLRCPSLTTVPAGVASLGSTCARLSPSRWPRKRSLSS

SEQ ID NO: 34725 - protein, 91 aa, Homo sapiens
KNRGGCLLLLVLHPSRHSAVSCLGVAAAMARKALPPTHLGQSWFCSCCRDTELAISALRARTATGSPGSCRCTAGPLPCASALESCCCRVT

SEQ ID NO: 34726 - protein, 44 aa, Homo sapiens
MLSRGWLLLVQVLPPTPRISARLCHGGQRPPRVKKKNEPFQSGQ

SEQ ID NO: 34727 - protein, 29 aa, Homo sapiens
MTTLQSLMCLSPVSLIVTLQQLFMTLKRE

SEQ ID NO: 34728 - protein, 67 aa, Homo sapiens
MKRRELSAAPSAVCPPAGGRNTWSDGIRPGLPWHLTSPTLHLRAHRPLRRPFPSPAPADSPCRQDFQ

SEQ ID NO: 34729 - protein, 59 aa, Homo sapiens
MWCLAAIVNRPWRGHRKGLPATHDLLRACLLTYDPSSSHPSATPVRRVLFCRLRWSAVV

SEQ ID NO: 34730 - protein, 35 aa, Homo sapiens
MQQTGMAGSSFTCYPALVLASLGLWWPLHQTSLCL

SEQ ID NO: 34731 - protein, 26 aa, Homo sapiens
MKGFYICIFLIFSCRRHIRSAFHLSS

SEQ ID NO: 34732 - protein, 37 aa, Homo sapiens
VAAAAAAAAAAAAAEAPVAAAASPATTTKKNPHQILT

SEQ ID NO: 34733 - protein, 76 aa, Homo sapiens
RCVWLQSTQTCLWTKLRRTHKLGFLASAPQTPANMTYLGNYKKGWPYVRTLIILALMCFSSIWHLSPTLPDLSPSF

SEQ ID NO: 34734 - protein, 29 aa, Homo sapiens
LMFLSAGPIVPLLRNVSPVQGQRLKRLLY

SEQ ID NO: 34735 - protein, 27 aa, Homo sapiens
ILNLVLSRCPLLSLSSLLRGSLFSGSP

SEQ ID NO: 34736 - protein, 24 aa, Homo sapiens
MRCCACVAGGLAVRLTASGLRLGG

SEQ ID NO: 34737 - protein, 56 aa, Homo sapiens
IISLCIPHVFPSCPLEFGGTSRLRHPSQGEAKRGIRMGGFLIVATFATVHDSINIG

SEQ ID NO: 34738 - protein, 62 aa, Homo sapiens
ILFLATSCEKTNIWVTLVSTLVLLLVIVASAAIDHTRVVIQKLVSLFICLVNFIIWFLSITN

SEQ ID NO: 34739 - protein, 120 aa, Homo sapiens
MFQIRLSSLRKMTNPFQAWFKLKLKLCLRFSSREVLIVSWLFLVYWLRNCALEGRGVLRMGQLMEGEWKTLVAQENMSTSVHHCNSGLIIIFSASVSTNETMPLNHILCCLQYFPPLRHL

SEQ ID NO: 34740 - protein, 61 aa, Homo sapiens
LSLFLFLEHCSCCPLPSHCLASLIGRPLVAMCPLSPASVVSLPESATIDNDLLNLPLYSVP

SEQ ID NO: 34741 - protein, 67 aa, Homo sapiens [sequence omitted]

SEQ ID NO: 34742 - protein, 21 aa, Homo sapiens
METPRRKKRANWKRPPRKDGV

SEQ ID NO: 34743 - protein, 45 aa, Homo sapiens
LRRAIWGLLCLMVAEENQEASLRKLAVRRKFWRLGRATQRYSVAW

SEQ ID NO: 34744 - protein, 40 aa, Homo sapiens
MGEWLADVPCCFFFLFFSFFFFFFFFFFSVCGPAFFCVCV

SEQ ID NO: 34745 - protein, 42 aa, Homo sapiens
LPVPLDSTYLHLLTSTLTVLSLTLTLTIAHVNFSREDENNQG

SEQ ID NO: 34746 - protein, 26 aa, Homo sapiens
LLLQLLQLPSGPTAAAAAFFLHDENI

SEQ ID NO: 34747 - protein, 67 aa, Homo sapiens
LLERGSRCGERGGVRRGAVGAVWLLLIEFLWCSLACSSVFCISCSVMFKLRNALCGSSESHLWFSRH

SEQ ID NO: 34748 - protein, 48 aa, Homo sapiens
LPVWLLLIEFLWCSLACSSVFCISCSVMFKLRNALCGSSESHLWFSRH

SEQ ID NO: 34749 - protein, 14 aa, Homo sapiens
LVQFSMFLCVLHLL

SEQ ID NO: 34750 - protein, 30 aa, Homo sapiens
LLIFLFYSVMFKLRNALCGSSESHLWFSRH

SEQ ID NO: 34751 - protein, 50 aa, Homo sapiens
MAGSPITVAMVKMLVLSAQLPSLSQHSGQKVGLSGYHHLYPQKDLNPVWP

SEQ ID NO: 34752 - protein, 41 aa, Homo sapiens
MTLGHHFLLFSFGAEPKNVHPLSLVLWCLLIFVFVLSIHLL

SEQ ID NO: 34753 - protein, 14 aa, Homo sapiens
LLLLYTFLILGFDR

SEQ ID NO: 34754 - protein, 54 aa, Homo sapiens
LTSLGGGAFLCLLNFMRILRLNYRPLFPGKSIHQCILKKKKKKKKPAKTVSKCS

SEQ ID NO: 34755 - protein, 58 aa, Homo sapiens
MGSQLPVHRETSDKKHVAHFSSRPTPDHESAFSASAPAPQRPCLRAPAASALQWPRPG

SEQ ID NO: 34756 - protein, 178 aa, Homo sapiens [sequence omitted]

SEQ ID NO: 34757 - protein, 78 aa, Homo sapiens
VGGGVEMGIGNCTGGLRRMENPSSSCTRTEAKGPQFNRKPKTRARKRPNTRASETSMSLPGKTPNKGEGAGAAGAGVP

SEQ ID NO: 34758 - protein, 152 aa, Homo sapiens
VSRRWPRSHCPLCCFSACMLSALVTRVLVLHRVSRPGQAQPSVSCDSLGGTRHDFPQNLHFMRQQPGLQGGGAAPGAGPHTGTAQGTHTSPTTHAGQGRKRSREGCPARSKCSCPAQGRRSLLRVCCWRREACFPLLPAPASVPARPPGSGL

SEQ ID NO: 34759 - protein, 41 aa, Homo sapiens
VTSTTRPSTATSSASLAFATTCSLSTAAPPTRTSTSSYAEA

SEQ ID NO: 34760 - protein, 76 aa, Homo sapiens
LAKKLLPVASMTYPRLFDAIRCHLLLLLDPLASLPFHSLTTAPALPTQLRFLLLGGGKKLLIIGQRDLPLERPSAF

SEQ ID NO: 34761 - protein, 76 aa, Homo sapiens
LRQLPALIHSFIHSLTSCLLNSSGLALGSSESHTLPPATCEICLETVGYSGKGRCPENPSGAGQKHRPCWAEAGMG

SEQ ID NO: 34762 - protein, 23 aa, Homo sapiens
MPDAGHLLLYLGNSCWASLWPPW

SEQ ID NO: 34763 - protein, 33 aa, Homo sapiens
MEPLGCLTSSGCLIVCLVNADGLNWSIDPLSPC

SEQ ID NO: 34764 - protein, 62 aa, Homo sapiens
LNPSPGACACMYVRVCVCVCVCVCLLGWSGRTLKQHGLLCVAVCLKLSRERLKDAGQGSGEI

SEQ ID NO: 34765 - protein, 72 aa, Homo sapiens
LNPSPGACACMYVRVCVCVCVCVCLLGWSGRTLKQHGLLCVAVCLKLSRERLLPILQMAPSEDNAEPGPAAE

SEQ ID NO: 34766 - protein, 38 aa, Homo sapiens
MGMGLNLGGLPCPRDCAHFLTGAILLPTVTAAPTKPAP

SEQ ID NO: 34767 - protein, 93 aa, Homo sapiens
LRGKPHAPIKGIFSSASKQAPMSQSHVFSFLSVLFGKETCRDVSSCQIPHFLLAQFHRSKHKHVLTGFSFLFSFLKCFIYLTRHCVFLSIFFF

SEQ ID NO: 34768 - protein, 29 aa, Homo sapiens
MKQIYGLGSPFFFFFFFLIETSISLCCLG

SEQ ID NO: 34769 - protein, 92 aa, Homo sapiens
LFFLFLLMLLTGPAMLLHLETLLPAVAVPLQLLSALLESASVIPPVPAQRLSTAARWFYLPQRLWLQFWASKFWLLHIFPFVPPALEVVAAF

SEQ ID NO: 34770 - protein, 15 aa, Homo sapiens
MTFGFSAFVFCFSAL

SEQ ID NO: 34771 - protein, 67 aa, Homo sapiens
LLGTAVFSQCGAAVLLMKTMILTLSLFGSCISNFERYMTERSIQVNLQKQYLGNCRARIINEICKIT

SEQ ID NO: 34772 - protein, 108 aa, Homo sapiens [sequence omitted]

SEQ ID NO: 34773 - protein, 62 aa, Homo sapiens [sequence omitted]

SEQ ID NO: 34774 - protein, 23 aa, Homo sapiens
LVLTRVLALVTFNALQSYDTGKP

SEQ ID NO: 34775 - protein, 106 aa, Homo sapiens
MSQSGSSLLFASALCYPSSRTSVLSGTMICDCHGKVLGRRRPAGSLKLTMEPGMKAALRMRIAFPGAKSANAVWLSELRGFTKSSRGGHLHSATCPTECRKYCLLR

SEQ ID NO: 34776 - protein, 47 aa, Homo sapiens [sequence omitted]

SEQ ID NO: 34777 - protein, 109 aa, Homo sapiens [sequence omitted]

SEQ ID NO: 34778 - protein, 111 aa, Homo sapiens
LQSAFSPAGPGLALRPAPCAAASSFCRRRPVLPGFLLCGGLTLCLWELEVDKGECRGVATGFFPVAAASRDAGSVGLLLATDLGHLPAASGQAMRPPSPATQRGRRVARRA

SEQ ID NO: 34779 - protein, 31 aa, Homo sapiens
MPSETGILLILLGHCGEVLAPMWTDLGTVGN

SEQ ID NO: 34780 - protein, 34 aa, Homo sapiens
LLLPLMSFWLTFWRSLLDTFLLVLEDQIHGTFEN

SEQ ID NO: 34781 - protein, 151 aa, Homo sapiens
LLPGDPQGPGTAAPRALGLPPRCEPVGAPLAALALARERRERGRFPRPCKCLFFNSSQCELCCECVRGGAPALSRRRVATPCPCPMVCNSDFAHRSTVPPSAHPFTLTPTLSLNTFIIVRRGRWDFGRSAAATASGGLIFIFALRWLKAFI

SEQ ID NO: 34782 - protein, 53 aa, Homo sapiens
LGLQVLLVLSSSSLAGHRDFWTGNCTILFSQQGGSRDCPPRKSGGLGIWTVPW

SEQ ID NO: 34783 - protein, 81 aa, Homo sapiens
LGLQVLLVLSSSSLAGHRDFWTGNCTILFSQQGGSRDCPPRKSGGLGIWWVCSLAVAWGSVALVMTRAPGRDVLVAGGPCA

SEQ ID NO: 34784 - protein, 59 aa, Homo sapiens
MLCSLLFSLLSLGLEEHGPPREWASASLDSCLLPRARPGGPEARVPRASKIFGFKPISC

SEQ ID NO: 34785 - protein, 12 aa, Homo sapiens
LTVLSQMVFLFT

SEQ ID NO: 34786 - protein, 36 aa, Homo sapiens
LTQTFTLAWAGCSGAASAHCNLHLPDSRILLPQLSE

SEQ ID NO: 34787 - protein, 51 aa, Homo sapiens
MCCLCVLWVLGVTFSLGDGIQNSSAGAPLLHLLPGSYWDPENHPLMVFAQA

SEQ ID NO: 34788 - protein, 64 aa, Homo sapiens
MERLGEPGILRDGDLDVKRKRKTKVNRQYCDQVSDGEISSISRTLLIDMKSPSSRQNSQQETCL

SEQ ID NO: 34789 - protein, 10 aa, Homo sapiens
VISSVFCFLF

SEQ ID NO: 34790 - protein, 79 aa, Homo sapiens
LAFAWSDHSSFSLTLNVENVAIVAACVVTLLLLSNFLTLKKGRMSASECDFLLTCSLDRLFSIVFFFVIFSINNQGDCT

SEQ ID NO: 34791 - protein, 23 aa, Homo sapiens
MGGTAERRWAESWSPWSWLCLCL

SEQ ID NO: 34792 - protein, 29 aa, Homo sapiens
LVLQMLLGFIGAGPSRAGPLTLPAWLHSP

SEQ ID NO: 34793 - protein, 32 aa, Homo sapiens
LHLSIWVAMAMACPPATVCPRPPQRQNEPIGS

SEQ ID NO: 34794 - protein, 64 aa, Homo sapiens
LSSERDCSGWLDLQGTLHPSCQALGQQHPLVAILCLVPGGLPIGLLGGAGRASIAQNCPKALLR

SEQ ID NO: 34795 - protein, 80 aa, Homo sapiens
LAASPPVHVYLSVCRSLSWSVALLLGMPLWRAWPGVYKRPLCWVFLLQVAGGPRPVWRMGWVGGWGRNGPSPTWPADSAL

SEQ ID NO: 34796 - protein, 15 aa, Homo sapiens
LNVSILVFGILAFGR

SEQ ID NO: 34797 - protein, 58 aa, Homo sapiens
MKTGRLSPSPVAVCLGPPVACRTKVLFHHLRCASGSPGAGPHPRRCCCSEWFHCLDNP

SEQ ID NO: 34798 - protein, 87 aa, Homo sapiens
LTAESSCLLSKLLCLLSSFLLNIVSFGVMETHFFIVMTLGAFVSKGGWGDGLQTEVRSSSFLRLDLFKQQTPTDGPEVVVVRVCGCF

SEQ ID NO: 34799 - protein, 66 aa, Homo sapiens
LGLCFEFQSFILGLALSSYCTHTFPRPQETGRGGILTDILDPVCCSLIMTVDASPCFSGSVSSSLK

SEQ ID NO: 34800 - protein, 104 aa, Homo sapiens
LLIFLNFSSSSFCPSCLPSLPKPSNPHPRLAVSHCPHPPSLLLFLCVWFLPSFPPFGFPESVGEGREGGPEWPSGWVGWGGASAPTPLTRRGTCLVPPREGAQA

SEQ ID NO: 34801 - protein, 11 aa, Homo sapiens
IFLGVYLLGSG

SEQ ID NO: 34802 - protein, 33 aa, Homo sapiens
IIQTLILLEGFVWMFSNCHQKVLGDHPSTSQLC

SEQ ID NO: 34803 - protein, 26 aa, Homo sapiens
RKMLGNIYLTCSTARTLASCCYSCKY

SEQ ID NO: 34804 - protein, 18 aa, Homo sapiens
LPNTAATPSVPLLLLVTA

SEQ ID NO: 34805 - protein, 108 aa, Homo sapiens
VPRKRTGTVLRLPAFRRWLRCGKSYQGRNCQTMSFFLFSEFTTDLSVLIKHGIQKTTKNLSFNFIWNSTVFLAPWTRLTCWLFPLAALSRGALRLLTPSVKNLRLACF

SEQ ID NO: 34806 - protein, 14 aa, Homo sapiens
LISLFCFLSLPPLS

SEQ ID NO: 34807 - protein, 51 aa, Homo sapiens
LRSREMMTLPIDQTKKYMFQSCVLLLCVSGIGGFLVSLTSRMKLRTLADRV

SEQ ID NO: 34808 - protein, 33 aa, Homo sapiens
KSSLLCACTTPLPSFSTFSCICMPVLNTLPYSY

SEQ ID NO: 34809 - protein, 15 aa, Homo sapiens
LHLLLIKLVAPFTFL

SEQ ID NO: 34810 - protein, 35 aa, Homo sapiens
ILTCLTPLDVGFFCLFVCLFVVFFFHSSCGPQPLS

SEQ ID NO: 34811 - protein, 78 aa, Homo sapiens
MRRTTTSRRKGTRCGWWAWASSCLSSSWPSCLAMCWSSQPLPSSSVCRRSPTTSSLHWPVLIWSWAWQWCPLGPPIFL

SEQ ID NO: 34812 - protein, 37 aa, Homo sapiens
LLKIISFVLLLLMLLLLYLTWVFYNVVFNFNCQSLNM

SEQ ID NO: 34813 - protein, 49 aa, Homo sapiens
KGLVKGLQGDGLGGRRFLFLLPFCLCSPNVPVSPLPHLGPLFGPCGQSC

SEQ ID NO: 34814 - protein, 38 aa, Homo sapiens
LRLATAFSPPGFAMFATAARSAIVMGMGGVEPPSPVSI

SEQ ID NO: 34815 - protein, 34 aa, Homo sapiens
KTTSMKIFMMIHFHVINSKCFLFLVICLITFSFL

SEQ ID NO: 34816 - protein, 19 aa, Homo sapiens
LFSLPPSGFCSFLLLLSAA

SEQ ID NO: 34817 - protein, 12 aa, Homo sapiens
VTAPFLIYLMAL

SEQ ID NO: 34818 - protein, 24 aa, Homo sapiens
MRLQGVILKSVLGIFLFFACFLKP

SEQ ID NO: 34819 - protein, 74 aa, Homo sapiens
LLQWREIITDGGTRRPSFPHRLLSLEASSEDLVGLSFWVWAISVLMCVLFYHYCITVFKPVGTQRTSLCNNNEE

SEQ ID NO: 34820 - protein, 28 aa, Homo sapiens
RVFFSLFFQIFCMFKHFHSRKLGGKSVS

SEQ ID NO: 34821 - protein, 74 aa, Homo sapiens
RSFVPSTCMALTRKWTGAGWLLLCLPVNSFTELGFCIIYYRLSPQICIILLAQNFFPWFIKALPLEMRDSVCLL

SEQ ID NO: 34822 - protein, 46 aa, Homo sapiens
LSTARRRRESPGLMKCSRILIYKQAAVVIYATPVYSVSFLSYGYRS

SEQ ID NO: 34823 - protein, 75 aa, Homo sapiens
ISFQTSALALALLYSQNWFLRLARVGGRVWEEDRFPPASLGSQEKSLQILRFRVKSQSSFFWSAQNCLCLLPHEE

SEQ ID NO: 34824 - protein, 35 aa, Homo sapiens
TLSMGLCWMRVLLTQVYTSISGQQKRRMTQAWCIK

SEQ ID NO: 34825 - protein, 68 aa, Homo sapiens
KTVYRVNLSVIMKKWQSSKKVVVMGRWRSTSPFVLWVTGCPPLLWGAHQQLRGEGQPCCTSTDIRSRQ

SEQ ID NO: 34826 - protein, 30 aa, Homo sapiens
MSHVCLKKEWALLLLESNLLIVVITFDCSY

SEQ ID NO: 34827 - protein, 27 aa, Homo sapiens
LQFWASKFWLLHIFPFVPPALEVVAAF

SEQ ID NO: 34828 - protein, 39 aa, Homo sapiens
RRGWPRRRSGLWVFCYRDRLEQKLFILGALWTLVIINQE

SEQ ID NO: 34829 - protein, 78 aa, Homo sapiens
IYWMSSAGRWNIARFSLAWYWLPFSRKCARAVWSWIQPPWLASLSLMSLPLCSLLWESSALLDMRLEGCLGLPTHKLC

SEQ ID NO: 34830 - protein, 60 aa, Homo sapiens
VLCYPQEPRDGLESAYIPEQESLPMKIGGIFCLFVLFCLLFVVCFFATNFSIHSALLDKS

SEQ ID NO: 34831 - protein, 65 aa, Homo sapiens
LAFLTTPLLCISFFHFLFQAFLFLPCGNSFGASDCSSSECAAIPVDPVPGACSKFSSVRPFAGLV

SEQ ID NO: 34832 - protein, 40 aa, Homo sapiens
RSCLRCRLKSVKLMSSSLWTTTAVSTWTASLLRSRPSTRI

SEQ ID NO: 34833 - protein, 34 aa, Homo sapiens
LCLPVSVLNLILSSYLLPVSTSRLPPLPRTNSCS

SEQ ID NO: 34834 - protein, 38 aa, Homo sapiens
INQDSGRQLLRKMLKGKHQGLVLIFESLRVVYFYSVNT

SEQ ID NO: 34835 - protein, 31 aa, Homo sapiens
LRCQVLPFLSSSQISPAMCADPAGRTTFLCH

SEQ ID NO: 34836 - protein, 45 aa, Homo sapiens
LYNCFLPPSKLTAREKFSCLIYLKPNGLQWIIHLLGIFLLLFKAK

SEQ ID NO: 34837 - protein, 27 aa, Homo sapiens
IISISQLILLSLSSLFAFSCFFFKKKA

SEQ ID NO: 34838 - protein, 104 aa, Homo sapiens
LFGLGSLMFLITQEDGHATGRPRTLHPADGCSRDCQTETTPHTQKAPKSQSLILFLERHCIILDHKICVIGFVSKTWDSGDKTSLQGYLCHCILAAFEAKHFNI

SEQ ID NO: 34839 - protein, 61 aa, Homo sapiens
RSPKEQYIEACLSQRLAAAAMTVQEPERESRSNSDAVNQISFSLFSFDFFLLFYLNCFIFL

SEQ ID NO: 34840 - protein, 65 aa, Homo sapiens
IFTKVVVLCLYLVQRILDLVPSYQGHHLLKASLMNSDKGYHFQFLLLILAEFSTVHRKLLSSVKT

SEQ ID NO: 34841 - protein, 21 aa, Homo sapiens
MQTMWSLMGMVLKLLLDLVIF

SEQ ID NO: 34842 - protein, 47 aa, Homo sapiens
IFFPCVYFLLFFKIRRKKVPSKWAFYKKYESYFSCPAREGGGDRAPL

SEQ ID NO: 34843 - protein, 60 aa, Homo sapiens
KPVLGLFQFIISGRLLLVLLGEVLDLLLEPLLPLFQSFHGAGKVLQLLLRVGELQGQRPG

SEQ ID NO: 34844 - protein, 17 aa, Homo sapiens
IVLNILAALAAFALEFL

SEQ ID NO: 34845 - protein, 99 aa, Homo sapiens
LSLEETEAGEEGSRITLPGGGGCRRGDFPWDDEDFRSLALLGAGVAMGFFYLYFRDPGREITWKHFVQYYLARGLVDRLEVVNKQSVRVIPAPGTSSET

SEQ ID NO: 34846 - protein, 38 aa, Homo sapiens
LLPSTNRVTRKIQDFLFFATILTPLLHSFFSVKYVNNN

SEQ ID NO: 34847 - protein, 83 aa, Homo sapiens
RGGLAGARERMWWAGRTPGTCGWWLDPGPMGSLLWGSAGSPAAAQVSGEVPAECFSCPKLHQRFAKMGWGGGMRTGRASVQQG

SEQ ID NO: 34848 - protein, 27 aa, Homo sapiens
LQLISCFLAILSLSSSIPQLSLSRTGL

SEQ ID NO: 34849 - protein, 28 aa, Homo sapiens
LKYPTIICGFLLSMLSFLVLHVFLKLYY

SEQ ID NO: 34850 - protein, 38 aa, Homo sapiens
LSFSPFPSLGLSFSLAALGWSLRARGDCQRCPLSVTGP

SEQ ID NO: 34851 - protein, 63 aa, Homo sapiens
TRPSSWSLRTSPMRAFIWTCGTWTLWSLSDRSLGSSRICMGFAGSLKRPGRTKARTTFWGTWF

SEQ ID NO: 34852 - protein, 40 aa, Homo sapiens
TAAAPASLSAALQPPAPPRSSLALRRPHRRPRPHQPWRRW

SEQ ID NO: 34853 - protein, 25 aa, Homo sapiens
IFLFLFMMNKVKIKALDKLNLAEFN

SEQ ID NO: 34854 - protein, 16 aa, Homo sapiens
MFCFVLFFGLFLYYKK

SEQ ID NO: 34855 - protein, 14 aa, Homo sapiens
LVLLLFFFFSSCMR

SEQ ID NO: 34856 - protein, 31 aa, Homo sapiens
MVCPFCDFCIGLFILSCGIFVLFLSFKLSLG

SEQ ID NO: 34857 - protein, 11 aa, Homo sapiens
IFLLQMVLLFV

SEQ ID NO: 34858 - protein, 11 aa, Homo sapiens
MLFKVLLYCLT

SEQ ID NO: 34859 - protein, 43 aa, Homo sapiens
LSRGWLLLVQVLPPTPRISARLCHGGQRPPRVKKKNEPFQSGQ

SEQ ID NO: 34860 - protein, 124 aa, Homo sapiens
MWKHLPVHSSPTPRLTPLWKLQARWLLPQLVYLQGWGSYSLLRPAALISMVLLAREFLYPAKMSVSEVCSSGLSSPLLEQHKTNLIFYASGDICSANGKSGFNQPLPFLKTFCCTHRILSCTYL

SEQ ID NO: 34861 - protein, 55 aa, Homo sapiens
LTTGRMLPFYMVLVWSTSIIMHFSGQLKHFRRCFMLIPAFVEPRKFIYDLGLCSK

SEQ ID NO: 34862 - protein, 19 aa, Homo sapiens
LCSLMLGLLGLQRWAPLLA

SEQ ID NO: 34863 - protein, 55 aa, Homo sapiens
LTTGRMLRFYMALVWSTSTTMHFIGQLKHFKMSFMLTPAFVEPRKFIYDLGSCSK

SEQ ID NO: 34864 - protein, 72 aa, Homo sapiens
MSRGRCFSGAITHSPPSASVVWTLSNGSGRSTANPPGSLGLWPRARQSLRRTYATSLRSMTWSSQPRRSSAW

SEQ ID NO: 34865 - protein, 35 aa, Homo sapiens
MKVPVGSSVLSSLGSSVRALLSVSFSLSSSLGDRL

SEQ ID NO: 34866 - protein, 91 aa, Homo sapiens
MSSWWKRGLRPSACSCCTAAWPRATSRAVSTTSPENCRHSSRAMAKPMPLLAPVTSATRLQDDMAERGARGTCVEGGPGFGPPGARPEEPS

SEQ ID NO: 34867 - protein, 96 aa, Homo sapiens [sequence omitted]

SEQ ID NO: 34868 - protein, 65 aa, Homo sapiens [sequence omitted]

SEQ ID NO: 34869 - protein, 33 aa, Homo sapiens
RLFRRICSLLCQFLMAAGSPWHVAASLLSLLSL

SEQ ID NO: 34870 - protein, 33 aa, Homo sapiens
ISDTSLSFSPLLLPPAHIASPLPPPSPAGLLAS

SEQ ID NO: 34871 - protein, 51 aa, Homo sapiens
MKVSPSLAPKKASRHLGSSSCPHCIPWFLYLVCLEILWWFWSCSNTSGSGP

SEQ ID NO: 34872 - protein, 32 aa, Homo sapiens
LDCLLQQFLGSKIVSCTSICLCLLLPTLSKTQ

SEQ ID NO: 34873 - protein, 32 aa, Homo sapiens
IGGEHSFSLLFGMLCCLVVTVPMGELYRKIVM

SEQ ID NO: 34874 - protein, 47 aa, Homo sapiens
LLNDLALFSGPIYHIPFLLQIFLLSPFLWDLSCYIPSELTNAFTFFP

SEQ ID NO: 34875 - protein, 29 aa, Homo sapiens
VVLADACPAVTSVGLVATATIFLGFGPVL

SEQ ID NO: 34876 - protein, 50 aa, Homo sapiens
RRSCRRGVSSSGMGSTKPAMLLAWVWTGAPQRKPRPTSWPSCTRRWTRQR

SEQ ID NO: 34877 - protein, 112 aa, Homo sapiens
LGLFLYLHIVVLYTIAKVGLLSTLLCLKLQRFCPDVSWNNAEDCLSGSRPIQFTSSRKYLTPALDPAALLRAEEGGNPMCLLPELPQPIFPQLGTWKKEPRTRLCFSFGPSW

SEQ ID NO: 34878 - protein, 8 aa, Homo sapiens
MHLHAFVS

SEQ ID NO: 34879 - protein, 8 aa, Homo sapiens
TLSWVTPR

SEQ ID NO: 34880 - protein, 43 aa, Homo sapiens
LQATTSFTWVRFVQFFVQNPKNLDNLHSRPSTGLASQRPSSFR

SEQ ID NO: 34881 - protein, 74 aa, Homo sapiens
LNLRRFLRGAAWMLLSPTRCISCCHQESSLASQGLRKYHQSDSTVLCPLRGRRKRMPCRTAHSVPLCSRTPSIM

SEQ ID NO: 34882 - protein, 20 aa, Homo sapiens
MTFLLFAFGLASFIFLIHRG

SEQ ID NO: 34883 - protein, 37 aa, Homo sapiens
MRRWACCSWSRCSCCPAPTDCPSTTASTTPTAPTTRT

SEQ ID NO: 34884 - protein, 50 aa, Homo sapiens
MTSRWRSRICGWRTMGVTAVRSLTGWRMKAVWWSWSCGDGAVCPHISPTC

SEQ ID NO: 34885 - protein, 16 aa, Homo sapiens
RTQIPALLLLVLHGHL

SEQ ID NO: 34886 - protein, 67 aa, Homo sapiens
LAKMSFTYIWWTQQGRMSTAFCPIHSSLGSMVMCLCILSPLCIASKSLRVCTKSYMKAMGKPGCQWF

SEQ ID NO: 34887 - protein, 46 aa, Homo sapiens
IWSMFVSLYLISPESGNYLYLLSVYCVPGTISMCIEKPWKAIQQYI

SEQ ID NO: 34888 - protein, 22 aa, Homo sapiens
IFLFVCIFFPLLVEVRFPPTRP

SEQ ID NO: 34889 - protein, 17 aa, Homo sapiens
IRRLQVRVLPRSKGGYD

SEQ ID NO: 34890 - protein, 30 aa, Homo sapiens
TARGPTCLPWLSMSLATPWAWATPQPPTPL

SEQ ID NO: 34891 - protein, 46 aa, Homo sapiens
RSKPSIMRATMIWRNRSSRRPWRRLLWPSVAQCPSSSWVKWTAAPS

SEQ ID NO: 34892 - protein, 81 aa, Homo sapiens
VLHPSRHSAVSCLGVAAAMARKALPPTHLGQSWFCSCCRDTELAISALRARTATGSPGSCRCTAGPLPCASALESCCCRVT

SEQ ID NO: 34893 - protein, 94 aa, Homo sapiens
MQTQAEALTAGMAGVATAAAGAWTQPQLRPVELPQRTRQVRAETPRLRPGGHECGRTYSPSACLSRPPWRRKSPMGPWHQMPSPTKGWLGRISQ

SEQ ID NO: 34894 - protein, 122 aa, Homo sapiens
MGGPLVSRDKKCFFRNASFLSKMKVLDSISFHLKISSVYLMASVVSFLKLLLTYWELKKGSVKASRGACPSQGGASLLSPAARALVLHQLQPQCPDTGGGKGSARTSRSTHRSCLVPICKIS

SEQ ID NO: 34895 - protein, 25 aa, Homo sapiens
MRLPGGRVPPTIVGTVSPRFPLTCR

SEQ ID NO: 34896 - protein, 15 aa, Homo sapiens
MNVTTLVTSYLFAVT

SEQ ID NO: 34897 - protein, 122 aa, Homo sapiens
MCYLLLLLIQTAELLIHPQGLQAVSNGESALKGTRPTFSSPFILVTEGRKEWEGVFLSSGWKGNTLSNYYISLVFYYSRILQPYFYCLWGKLEMVTLIRSVWRGINGGDKIQLVLENVKVLK

SEQ ID NO: 34898 - protein, 23 aa, Homo sapiens
MSRRFIFSLCFFLFQFILNAYFS

SEQ ID NO: 34899 - protein, 47 aa, Homo sapiens
MLSRGWLLLVQVLPPTPRISARLCHGGQRPPRWLTFSPTICFLLLKG

SEQ ID NO: 34900 - protein, 38 aa, Homo sapiens
MGDLSALLASPHPGLARAAIPHGNNRVETRSLLSGCSS

SEQ ID NO: 34901 - protein, 47 aa, Homo sapiens
MLPPGTDHSSCLVLSQVSSSLGCLKNEKPKRQGPGMPNIHSISGESG

SEQ ID NO: 34902 - protein, 32 aa, Homo sapiens
MQSHEECAEGRGYFSRWSCQIGTLWRVWPENF

SEQ ID NO: 34903 - protein, 9 aa, Homo sapiens
IAALLPLWM

SEQ ID NO: 34904 - protein, 33 aa, Homo sapiens
MPVPWALSPRGKTCFLTPALVGLWRSAAGLFYL

SEQ ID NO: 34905 - protein, 39 aa, Homo sapiens
LVREGTPHQSHLTKARQSSFCLALVILVIGLQKKNNFAG

SEQ ID NO: 34906 - protein, 48 aa, Homo sapiens
LSFGVRARMSRRLAAVCRMGRGIMIRMCGSRSPAGSVSVTLGLSSATT

SEQ ID NO: 34907 - protein, 45 aa, Homo sapiens
MRRVLIDLPTGASGLRHAGGAPAAASALGPRGSPVPGVVQSGSKQ

SEQ ID NO: 34908 - protein, 32 aa, Homo sapiens
LTDVKAFWLDCFHLVIMSFPCVPVIFFHHISK

SEQ ID NO: 34909 - protein, 66 aa, Homo sapiens
LHADASSRPTRFPLPSTLSPTLSPSLFLSPLLATNILLSVSMNVTTLVTSYNLPGKGDMNVCNDTS

SEQ ID NO: 34910 - protein, 26 aa, Homo sapiens
LLATNILLSVSMNVTTLVTSYLFAVT

SEQ ID NO: 34911 - protein, 20 aa, Homo sapiens
LPLCITVLMYIFLLDHELLW

SEQ ID NO: 34912 - protein, 70 aa, Homo sapiens
LQMAGERVCQLFTFFPQLRFFFFFFFFWQGTRSMVVLAICLPSRFSSAPGRECGGPLFCTCTTSLSSYCT

SEQ ID NO: 34913 - protein, 22 aa, Homo sapiens
LLLVFFFFLAGESLEPRRRRLQ

SEQ ID NO: 34914 - protein, 41 aa, Homo sapiens
MPAPSALKGTSLILLLTGLRPQLVATTTYQAISRVGLRTQS

SEQ ID NO: 34915 - protein, 79 aa, Homo sapiens
MKGLGQAGPSCLRSLLVAVACSSSLVVQIPRLTKRRNSFYLHPGPIIADPDVCRGENKRSKNRPCCEGPRGSARMKELE

SEQ ID NO: 34916 - protein, 45 aa, Homo sapiens
MKGLGQAGPSCLRSLLVAVACSSSLGKIKEAKTGPAVRDHEAVPG

SEQ ID NO: 34917 - protein, 44 aa, Homo sapiens
LLHQHCDWRLQHHSGLWEGPCFGFLLCVWLQRWLQLPHHPEEDS

SEQ ID NO: 34918 - protein, 30 aa, Homo sapiens
MLSTSSVKLSTLSPSPSLLGKSPPMPSCCS

SEQ ID NO: 34919 - protein, 41 aa, Homo sapiens
LCQLSSIQISFLCLMLLPYPIPGPSSAFWKFPFAQEVVSSS

SEQ ID NO: 34920 - protein, 602 aa, Homo sapiens
VSPPAESVCGLGENVSDILGRSRGRAGSERPRDSPSLEPCPPRSPPVRRAPDIATLHPRDCPTPGPRGSAASLPPPTPAATAQFPQPDPVCRSQSLQAASGTFGGPVGRPGRAGTEPPRLGQWAWAGAVAEDLARPLQTPGDSHTAAAMATNKERLFAAGALGPGSGYPGAGFPFAFPGALRGSPPFEMLSPSFRGLGQPDLPKEMASLSVETQSTSSEEMVPSSPSPPPPPRVYKPCFVCNDKSSGYHYGVSSCEGCKGFFRRSIQKNMVYTCHRDKNCIINKVTRNRCQYCRLQKCFEVGMSKEAVRNDRNKKKKEVKEEGSPDSYELSPQLEELITKVSKAHQETFPSLCQLGKYTTNSSADHRVQLDLGLWDKFSELATKCIIKIVEFAKRLPGFTGLSIADQITLLKAACLDILMLRICTRYTPEQDTMTFSDGLTLNRTQMHNAGFGPLTDLVFAFAGQLLPLEMDDTETGLLSAICLICGDRMDLEEPEKVDKLQEPLLEALRLYARRRRPSQPYMFPRMLMKITDLRGISTKGAERAITLKMEIPGPMPPLIREMLENPEMFEDDSSQPGPHPNASSEDEVPGGQGKGGLKSPA

SEQ ID NO: 34921 - protein, 40 aa, Homo sapiens
LRRKLSGGEEQRAGLGQCSPACILALMSSPATAKELQSAR

SEQ ID NO: 34922 - protein, 27 aa, Homo sapiens
LGQCSPACILALMSSPATAKELQSASR

SEQ ID NO: 34923 - protein, 108 aa, Homo sapiens
VGGLRLLLGAVHLTVPAIGESPVLVAFDGDEGVVTRLRVPADPGHHRHVQVLNAECSCAASAQTMATEQRLAQPDLLHPSSGEQMDRSAETPSGHLPPLCGEKVVFDG

SEQ ID NO: 34924 - protein, 29 aa, Homo sapiens
LGSCCLGLCSVQFAVVFFSPMLGWWGTGK

SEQ ID NO: 34925 - protein, 26 aa, Homo sapiens
MPDPRRLLLLLLPVGSHFPPNLIIEW

SEQ ID NO: 34926 - protein, 54 aa, Homo sapiens
LSPILTRLFALPSPPTQGLPSSPPCNTAPRTMSVYLETARPIPFWVSSVPFSHR

SEQ ID NO: 34927 - protein, 58 aa, Homo sapiens
LHLQIQYSVYLLQPHPHRENLWLWGWGEGWWLVKAILSCVSAMLWAQKKGHQSPCANT

SEQ ID NO: 34928 - protein, 28 aa, Homo sapiens
MARWGFLTVRLGLPPCPCQEFPTNPTTL

SEQ ID NO: 34929 - protein, 54 aa, Homo sapiens
LLGLYFILFSIESIGGPVQWLTPVIPALWEAKAGGSRGQEMETILANMVKPRLY

SEQ ID NO: 34930 - protein, 27 aa, Homo sapiens
MKQSTSFSSIVLTSLPFIQLDRHSHSL

SEQ ID NO: 34931 - protein, 56 aa, Homo sapiens
VILNKSHKIWWVYQGFLLLLLPQFLLLPPCKKDLLPPTMILSPPQPRGTISGGFFK

SEQ ID NO: 34932 - protein, 72 aa, Homo sapiens
LTINLDSGCSNFKFFSSFSLQAFIWSLFESEDPENLDPLLALIPLGSVIWIEQMLRLPLHHILETALLYSKS

SEQ ID NO: 34933 - protein, 37 aa, Homo sapiens
LALSPRGTAGSRGDECSRNLRSLCAYFRDRHHVTVTS

SEQ ID NO: 34934 - protein, 154 aa, Homo sapiens
MPRGTQRRPAQAACVRRCGAPWCGVALPLSLPTGRRAPCCQPEARRRLPPSRLRRRRRSVLWVECARSSSDGGHSTGGTRAIHPAAGEKRMAEVGETRVNQQEEVPGPRSYDGDPSWKSLLHPGHFKRRWRQTAGGCRPDSETPSFQSCSALRR

SEQ ID NO: 34935 - protein, 19 aa, Homo sapiens
VNFLGAMMYCNFILMYFDL

SEQ ID NO: 34936 - protein, 70 aa, Homo sapiens
LVHTSSVCVCVCVCVCVCVCKGRVGIDTATQLEVIVCILHCWSDLVYLCQTAAHEFCLNLEMLQVVMWCL

SEQ ID NO: 34937 - protein, 13 aa, Homo sapiens
LYMSASGGLLGLF

SEQ ID NO: 34938 - protein, 10 aa, Homo sapiens
LKMLMSALVF

SEQ ID NO: 34939 - protein, 44 aa, Homo sapiens
MYTRTRTRAPVSRAVSLADTQALTSLSLPACRAATPKTQLRVPT

SEQ ID NO: 34940 - protein, 38 aa, Homo sapiens
LAVAMDTLCVAAMGAVLQQSQGISLLRVLCFIMKNNGR

SEQ ID NO: 34941 - protein, 55 aa, Homo sapiens
MCLALQQFLLAASAGLLSLCVAPGVKMTPAVCTRQGYQVRNWLILTERFAPFSLE

SEQ ID NO: 34942 - protein, 16 aa, Homo sapiens
MPPYRNMSRRINHLPL

SEQ ID NO: 34943 - protein, 55 aa, Homo sapiens [sequence omitted]

SEQ ID NO: 34944 - protein, 71 aa, Homo sapiens
LGNLSCSFLFNFFYLSLTRAYSHWICRRSVGDRGCEGLCHPSSRIWGERAPSLLSLPPFRTPRRDSFWDSH

SEQ ID NO: 34945 - protein, 61 aa, Homo sapiens
VPERAGLAAATAAAQAAGASLPRAALPALLPGRAAGMGRPREPERAQEPPPPPPASPLPRA

SEQ ID NO: 34946 - protein, 50 aa, Homo sapiens
LGPGLIWQSSSDDLGAKWLLELLCVVNLLFAHRFHFGHCLFKRPRHMHSF

SEQ ID NO: 34947 - protein, 35 aa, Homo sapiens
LMKQICPHGLVYLCREKDIVKLLLIWFALFITWIV

SEQ ID NO: 34948 - protein, 40 aa, Homo sapiens
MYLQLLPILTTESLSVVLLGRQLNQFWFIPLFLLLLLGCS

SEQ ID NO: 34949 - protein, 38 aa, Homo sapiens
LVESNTLTAIKMFAWKLVSLMTNICISDEYVCLKMLSF

SEQ ID NO: 34950 - protein, 32 aa, Homo sapiens
LGSIAYERAEFHASVRTLGWAFLPPGTLKLQE

SEQ ID NO: 34951 - protein, 74 aa, Homo sapiens
MNTVRHSSMFFFWNRVGILFIVCLLLGVFAIRVYWRLTLNGCVLRPELLGVGVLKECAGVLGFKFLLWRSRFRK

SEQ ID NO: 34952 - protein, 26 aa, Homo sapiens
MDCSLLTCSAVSSLIYSQNKYICDQL

SEQ ID NO: 34953 - protein, 32 aa, Homo sapiens
LCAFWGVFNGNSRCFAFLCPSLVSCASLLTVM

SEQ ID NO: 34954 - protein, 120 aa, Homo sapiens
VSRPLPLLLGVFLTSGAAAVRARKTPRLARRSAQPAGFLWKSGGPTVNVRPFDRSWRSSVDPRFSLLINVGQFETGSRAYVLRKKNFIETSGGVEKTILTITVYYRSEFHSPKMLKKQAS

SEQ ID NO: 34955 - protein, 85 aa, Homo sapiens
MGCRGNKLFVLSYCTCLTWLLGTKSQKNPFQVCMSGGWAVSRLETGFQALHDGRASSPLSAACVLDRTVARRWKPPSVPLAHHTK

SEQ ID NO: 34956 - protein, 52 aa, Homo sapiens
MHQRPVKFIAFPSIFIKQYCIIKINIFITCLKFLFCCFKMCTLNISEPYFFL

SEQ ID NO: 34957 - protein, 50 aa, Homo sapiens
MPILAYFVCHRHRQRELGHACYGDPLVGHLIGCLFMRGLLFFTFYAALLP

SEQ ID NO: 34958 - protein, 32 aa, Homo sapiens
LHSLEDWLLMGICLRSSLYISCLGGFSYLPFY

SEQ ID NO: 34959 - protein, 55 aa, Homo sapiens
VPYVWLCPLCCRGKLHCHCSHLLTGRKMPGLLALSPHLLFLIVAPQMGFACSCQA

SEQ ID NO: 34960 - protein, 96 aa, Homo sapiens
LGNLGVMVVSLFLLPFCKLHPHVLLLPLLQTFQGWVGKKAASLRTVYCSGYSNGVIVIKRQKAKIQSNQTKGTRRTSRPTTIENTPHLTLVFAGTS

SEQ ID NO: 34961 - protein, 81 aa, Homo sapiens
VVPIRNAFWRGFPLFNRFLPLSFFVPCALEVTSGMYPGGSYIPLCKVPSWFGSGGGCHPTHRSPPCPRTSSEQAGWSEGAP

SEQ ID NO: 34962 - protein, 24 aa, Homo sapiens
LSPGALRILTVLIITAIIQHMMLE

SEQ ID NO: 34963 - protein, 23 aa, Homo sapiens
VAAQLQVLARPGLALWMMMALPP

SEQ ID NO: 34964 - protein, 118 aa, Homo sapiens
MGTRAAWFLALPFTPLPSRRCYWWPTRVHWGVMPAAEGSHLCSLEASLGYWKAPCPGDKCLGSYSLLSGPLIQEPVTGGVGTLWYCGLCLELSVGPAEAGRPLKPLPCPAAPSPPLLP

SEQ ID NO: 34965 - protein, 25 aa, Homo sapiens
MALKTALSLCMPLSSSSCHHRLILR

SEQ ID NO: 34966 - protein, 18 aa, Homo sapiens
RWWDLTVGPISLFSALLA

SEQ ID NO: 34967 - protein, 69 aa, Homo sapiens
MGQDGIVKWLFTVNCNTILFMDLFAYFSLHRETFLPWLRTHSWIEPTGELSGKHLANFFFFEMESCCVA

SEQ ID NO: 34968 - protein, 28 aa, Homo sapiens
IECYSTLDLSLIFWSLASCIFLEPQLNS

SEQ ID NO: 34969 - protein, 36 aa, Homo sapiens
MLNMETAQFSWRTVHLMSLDILSMIIQYLLMGSLFS

SEQ ID NO: 34970 - protein, 25 aa, Homo sapiens
MIFNSFRSSVMFLNIIVFVAMQKFH

SEQ ID NO: 34971 - protein, 36 aa, Homo sapiens
MTTTSYMCLLQIVRAGSAGCWPLKKKRGLAMLPRLI

SEQ ID NO: 34972 - protein, 35 aa, Homo sapiens
IPMWCIIQKENSWHVTISTTCTLSLSLMSLKSRSW

SEQ ID NO: 34973 - protein, 18 aa, Homo sapiens
ILAPQVWDFWVFSWLASC

SEQ ID NO: 34974 - protein, 103 aa, Homo sapiens
KRFSCSHCWQMIEPGFESRQPGSRPCALNSRFASRTESYERLAQCLVLSRHSDSSIKEHCVHAEVHSTWSETACVRFLIPFITGCVISNKKTEEPAGRGSSRL

SEQ ID NO: 34975 - protein, 40 aa, Homo sapiens
LIFFSWCVWWLFLSVEGKRRYHPRLSPTPLQNGFSDTPAV

SEQ ID NO: 34976 - protein, 40 aa, Homo sapiens
IMWVTVMMSNAFAVMVDSGVGNLEMIHGFNMPSGFQGVST

SEQ ID NO: 34977 - protein, 11 aa, Homo sapiens
LCCVWVCVFLF

SEQ ID NO: 34978 - protein, 88 aa, Homo sapiens
MSWFSLLKICLSSLGGLMHFSVSADQLLPPPNLNGRMRHSGFSYPKRGFFPLFVSIIHFIGRNSVPVNSNWDQRNRVPLLKMAVTRGY

SEQ ID NO: 34979 - protein, 294 aa, Homo sapiens
MLISVTGLKGVEAQNGSESEVFVENYETLVFYWPSLLCLAFLLGRFLHMFVKALRVHLGWELQVEEKSVLEVHQGEHVKQLLRIPRPQEKKKSWFQTRIYEWDPCFQFPSRMIGTIVLAFICLYLFIVIEFCVFVYVRDELDVLENNLESYITFTNHSGVLTPVILQVKELISVTKGVWVATILPAYLTCVSYLFHILVCYRKHMKRLWAGDKHFLPLKFHNPASSESMVAIARYSGWQIAYILWGYLIIHMVQSLCGMAIMYSLVLPIVQTRAWKCCKGWALGSLQYPSLWVS

SEQ ID NO: 34980 - protein, 25 aa, Homo sapiens
LFLNASQALLLGLLLLINPNICTKN

SEQ ID NO: 34981 - protein, 40 aa, Homo sapiens
LRNLLKIISFVLLLLMLLLLYLTWVFYNVVFNFNCQSLNM

SEQ ID NO: 34982 - protein, 117 aa, Homo sapiens
IQPRMLQRSLFLLLLKTTGDHFGNLKKLWSLPYMTTKPMILRNSHCGATKSTACWTVLRFTGGESRTGMGMKDMYQAVIWWKNLQIIWKPMSGTIRVSAETKLKNFFWTQAKKEPSW

SEQ ID NO: 34983 - protein, 15 aa, Homo sapiens
MKTSISWWLCMTTPL

SEQ ID NO: 34984 - protein, 71 aa, Homo sapiens
LSFLALLCSVRAALELCSPGRSPSTSSAAEEPSASAPAPLSSAAPIPGSSLRGVELFPMTVLIRLHYTFVC

SEQ ID NO: 34985 - protein, 95 aa, Homo sapiens
VGLLSTLLCLKLQRFCPDVSWNNAEDCLSGSRPIQFTSSRKYLTPALDPAALLRAEEGGNPMCLLPELPQPIFPQLGTWKKEPRTRLCFSFGPSW

SEQ ID NO: 34986 - protein, 28 aa, Homo sapiens
MFLSAGPIVPLLRNVSPVQGQRLKRLLY

SEQ ID NO: 34987 - protein, 30 aa, Homo sapiens
VLMFLSAGPIVPLLRNVSPVQGQRLKRLLY

SEQ ID NO: 34988 - protein, 42 aa, Homo sapiens
MQTRGAGIPSPGWSAIWNLTRWKQHRGGFGPGVGAWRDRGCH

SEQ ID NO: 34989 - protein, 46 aa, Homo sapiens
IMDQILESNKFTKGFALLSWLGCSGMNMAHCSLDLLYSSNPPSSVS

SEQ ID NO: 34990 - protein, 13 aa, Homo sapiens
LRIMCVGVSWTLL

SEQ ID NO: 34991 - protein, 32 aa, Homo sapiens
KRKSKRNMWCVFYSSFGIYWIWLGTLIACYQS

SEQ ID NO: 34992 - protein, 14 aa, Homo sapiens
MENHFDPWFSLPGD

SEQ ID NO: 34993 - protein, 39 aa, Homo sapiens
ILLIYFLIMLISNEDSCLKIFFNLMVSIFCKNHVNLFHS

SEQ ID NO: 34994 - protein, 52 aa, Homo sapiens
LIFFSWCVWWLFLSVEGKRRYHPRLSPTPLQNGFSDTPGSEGVGSPGCARSK

SEQ ID NO: 34995 - protein, 56 aa, Homo sapiens
LKRLGLSLLVHASSASGQQVTVMMSNAFAVMVDSGVGNLEMIHGFNMPSGFQGVST

SEQ ID NO: 34996 - protein, 14 aa, Homo sapiens
MGMFCISCLVLNFL

SEQ ID NO: 34997 - protein, 27 aa, Homo sapiens
IPAEFLYLVLLLIKGAPVSSFSPSPGT

SEQ ID NO: 34998 - protein, 48 aa, Homo sapiens
IQRIFLKKIRKHMVKFLKNSIQYVEVFKMLAPVSLIPAVSEFDGTCFL

SEQ ID NO: 34999 - protein, 41 aa, Homo sapiens
KCCCLVEIQYYIMTCYYASLPNSSSGDAILKSAILRVFTHC

SEQ ID NO: 35000 - protein, 9 aa, Homo sapiens
MWPYRQPSL

SEQ ID NO: 35001 - protein, 62 aa, Homo sapiens
TVPERAGLAAATAAAQAAGASLPRAALPALLPGRAAGMGRPREPERAQEPPPPPPASPLPRA

SEQ ID NO: 35002 - protein, 48 aa, Homo sapiens
MHLFRKLTMKIGGLTRILSLRRMVQMKVPIICYFLHTVDFFVLQTFSF

SEQ ID NO: 35003 - protein, 18 aa, Homo sapiens
MPRTQIPALLLLVLHGHL

SEQ ID NO: 35004 - protein, 43 aa, Homo sapiens
VALRITCTGLPSASLERMNLHHLTSLFSSYLLFVCLFLFLQLK

SEQ ID NO: 35005 - protein, 28 aa, Homo sapiens
MRKLRLEGEKQLPLAAWLLAAGCPWSSW

SEQ ID NO: 35006 - protein, 52 aa, Homo sapiens
RMSTAFCPIHSSLGSMVMCLCILSPLCIASKSLRVCTKSYMKAMGKPGCQWF

SEQ ID NO: 35007 - protein, 22 aa, Homo sapiens
LTAGTSLHHPVPFFPLVKMEIC

SEQ ID NO: 35008 - protein, 16 aa, Homo sapiens
LILTITTVFLAIVCSD

SEQ ID NO: 35009 - protein, 51 aa, Homo sapiens
LRLHTPTAVASPVPRPRGRRPKSGGNSLSHKAMGKRDPVETRVLLCFPGWF

SEQ ID NO: 35010 - protein, 25 aa, Homo sapiens
KKVASRSSSLFVRLGSIRPRRPTLR

SEQ ID NO: 35011 - protein, 6 aa, Homo sapiens
MPETME

SEQ ID NO: 35012 - protein, 61 aa, Homo sapiens
LKPVLGLFQFIISGRLLLVLLGEVLDLLLEPLLPLFQSFHGAGKVLQLLLRVGELQGQRPG

SEQ ID NO: 35013 - protein, 23 aa, Homo sapiens
MIKDDVSLFLLFLRRLSCLLFGE

SEQ ID NO: 35014 - protein, 24 aa, Homo sapiens
VAASLSLSLFWGLIFAVLIPGLTR

SEQ ID NO: 35015 - protein, 64 aa, Homo sapiens
ISLLARGNHRLFSRILFFSHLLAFFFLPPWLPSPNPAIPSSTPVLPSPAILSHPTCNLLSFAPP

SEQ ID NO: 35016 - protein, 64 aa, Homo sapiens
MRLHGDDLPLRILQQRGLVHFFLPSVTATTVTWNWTSGMIPAVLSSEPAPSQLSLHKASISQAF

SEQ ID NO: 35017 - protein, 108 aa, Homo sapiens
LTGCVTLGPELPLSGPQRPYEGPLLQEHPHDIAFGGAPVACRIACGLCNLLRFKTDGHMCQWGSLSPGPKKQGTKFKTLASSQPLKPWPPEFPFLSLSFYFFYFYFYF

SEQ ID NO: 35018 - protein, 66 aa, Homo sapiens
LSVFLHNYIFLPLSPPTHIFLFPFLSLGTLPHAPLPHPLFPFPSSHPSIPIFPQQLPALAGSPQLV

SEQ ID NO: 35019 - protein, 61 aa, Homo sapiens
KPFLLPPLPPLLLISAGTEVSSLVFQKSPLHTQPEGAIKTVGQPTSVHSKVLSKGSLLLGE

SEQ ID NO: 35020 - protein, 102 aa, Homo sapiens [sequence omitted]

SEQ ID NO: 35021 - protein, 142 aa, Homo sapiens
MPGMATLMADSMCDDSYSSCGRQSISSSRSLPSSSCSLSHATVLLIAISDAKGTGLSVSIMGVELRERAGCLPDAPRGRHRPSAPRAKLPLSERGLIPPRLTQAEASGWGRRDRSKAGGSLCTQLQPLALSVNESLSMKLPR

SEQ ID NO: 35022 - protein, 56 aa, Homo sapiens
MLKEKRSKSHSSGGSVATPRCPLGTNPKATSACLVGNVNCYPESRPSLSLVQDRKY

SEQ ID NO: 35023 - protein, 88 aa, Homo sapiens
MWDGVELSANSSRLWSLQTSQGRNSTKPLLSLAVICLQHAVWWHPAGFTSFLPTFWPMQSIRPFSVALGWIGPIVVIYGYCLIYLLQY

SEQ ID NO: 35024 - protein, 52 aa, Homo sapiens
MRGPWSPQPGTLVLFSALAPPKQSPSMRWAQPSPTSCWPSWTSTTSASGCRS

SEQ ID NO: 35025 - protein, 38 aa, Homo sapiens
VFENRASATCMMWIGEMVCPPSHGMSLLCSGIFPSLGF

SEQ ID NO: 35026 - protein, 48 aa, Homo sapiens
ISPLLLKPRLFILPPAWAAGCSSGWAWSQEQGECAPGPPSRVPGPWCG

SEQ ID NO: 35027 - protein, 16 aa, Homo sapiens
MIMEMVYLMLKMSLVF

SEQ ID NO: 35028 - protein, 18 aa, Homo sapiens
LDYTQSPADLLLFLILLS

SEQ ID NO: 35029 - protein, 35 aa, Homo sapiens
ILVREVFLLSSLAPLASFPENWAQTRKCGFVWSTH

SEQ ID NO: 35030 - protein, 18 aa, Homo sapiens
LDYTQSPADLLLFLILLS

SEQ ID NO: 35031 - protein, 46 aa, Homo sapiens
MVPVNVLLPSCGCSTACSTTASQPSSGPCSGIDSISENSTQMLPSC

SEQ ID NO: 35032 - protein, 34 aa, Homo sapiens
RSPRNISMKLGIVGHLYYLGGSVLALSLKHLTKK

SEQ ID NO: 35033 - protein, 69 aa, Homo sapiens
LVHSHHPQLWLLHMGCLLASEYPLSEPWAPGPLHSVLGGPPSHPPVQWVLACLADSCGRVLVCHSIVQA

SEQ ID NO: 35034 - protein, 19 aa, Homo sapiens
KMARASLWRAGGTLTLTAL

SEQ ID NO: 35035 - protein, 15 aa, Homo sapiens
KRFQIRAEMGRRGGS

SEQ ID NO: 35036 - protein, 78 aa, Homo sapiens
MKSTFIQGLLWKTSPKGEVLLCCPGWSAVVQSQPTAASASQVQAILLPQPPEQLGLQLLNRRLLRVSRNLPLCMVLLM

SEQ ID NO: 35037 - protein, 50 aa, Homo sapiens
MVRRDTQRLRQYNAPNHPPRPDAPPTHGKESHLVRDYSHFRGGVLLFFLP

SEQ ID NO: 35038 - protein, 28 aa, Homo sapiens
MPCEDGSETEVMRLQAKECEEWPATTGS

SEQ ID NO: 35039 - protein, 56 aa, Homo sapiens
MGRGSSTGRLPGERNGDGGAARRARARARPALGLPAAPLRRSPAPLLLAPENPSPA

SEQ ID NO: 35040 - protein, 83 aa, Homo sapiens
MRARLRVVWGGTPSLRVRPGGSHVKGTRLEGAPAGGAEAPSLRVRLGGLRGEGTGLERAPGEDGGGPDCEGVSWGTCLGGTGR

SEQ ID NO: 35041 - protein, 31 aa, Homo sapiens
MKGSPYRLQTCQLVKEANRTVCYKLQSMYLC

SEQ ID NO: 35042 - protein, 89 aa, Homo sapiens
MWTQRNTRDAHTQRTDHGKAQQECGRLQAKERSLKRNQPALDLGPPPSRTLPASPRLLVRTQPQRGRRAEAGSPFGLCIVFHRFNMKQK

SEQ ID NO: 35043 - protein, 39 aa, Homo sapiens
MQRWRPPVIPALREAETGGSLETSQDNMAKPHLYNKYKN

SEQ ID NO: 35044 - protein, 42 aa, Homo sapiens
MPSWNFPPSNPSFVFPWLFDNNGWSPEPDPLYRTVFVISSAL

SEQ ID NO: 35045 - protein, 45 aa, Homo sapiens
MLGLEDASDIRCRPGQATSSRLPHRDVLWSHGPVLFCRLVLSFVK

SEQ ID NO: 35046 - protein, 217 aa, Homo sapiens
MRWRRTRLIPIIWRSWKTTTTPVTAQKAASGAIVPTAALQVPTQPSCCRLLPHLLCPPPLLTRVLCILLRSPPNPASPPNRGEMRGHIKWQKTRFTRGKRRIVKNGDCIVAVCRLHSLALSLPPNLLFFLFKICASAVSPPGRIETLANTYPLHSFLSPCFGLVFWNERSLLFYKPLCISNVVSFRFLLDMLLKRELRVWTDCGTQTHTKTCLFSHP

SEQ ID NO: 35047 - protein, 134 aa, Homo sapiens [sequence omitted]

SEQ ID NO: 35048 - protein, 51 aa, Homo sapiens
MKDIAVSFTTGSMERKRSLQRLNKQHALWYPLFKNCELTTVVVFSFTILMA

SEQ ID NO: 35049 - protein, 32 aa, Homo sapiens
MVYAIFLHLELTWRHVWPNCFSFISGNNQTRD

SEQ ID NO: 35050 - protein, 26 aa, Homo sapiens
MLQDTESERMHPVLPSGFTTKASLHL

SEQ ID NO: 35051 - protein, 51 aa, Homo sapiens
MNGKREENMWIRPGKRAAQPSHSQDEMQGEFWKLRVSCCWVVWKDRLELGS

SEQ ID NO: 35052 - protein, 29 aa, Homo sapiens
MPVKCHLNSTVPGVRQARGTQFCLSSGFS

SEQ ID NO: 35053 - protein, 28 aa, Homo sapiens
MGLESGLNHSSIMPPWQGWQRGRIMLRK

SEQ ID NO: 35054 - protein, 34 aa, Homo sapiens
MPSWAVFTPPRCHNRLALPCLSVYSAFPAGRRVW

SEQ ID NO: 35055 - protein, 24 aa, Homo sapiens
MFYHQKHFQLGLKGTETEKNERRL

SEQ ID NO: 35056 - protein, 103 aa, Homo sapiens
MSLEFAPRHPSGARLLCDPSPHFLVGLLDPRTYLQQQLDPLDGRYRRLGDGCGHSTCQEVLGEGHSGICHVERGGRLLQDGTGPGTGFDSGAAGRSEANGRFI

SEQ ID NO: 35057 - protein, 45 aa, Homo sapiens
KEVPSGTPFMAILMLHLLHFSEGPTPLKFSLEDEWVVVEILKKWK

SEQ ID NO: 35058 - protein, 13 aa, Homo sapiens
LASQSAETTEREC

SEQ ID NO: 35059 - protein, 12 aa, Homo sapiens
ILETNHTDEPMR

SEQ ID NO: 35060 - protein, 11 aa, Homo sapiens
TCVAGTFFILC

SEQ ID NO: 35061 - protein, 45 aa, Homo sapiens
LSILQSLVPAAGAASPVAISAQHLCYSHVTPGDPGAGAGQGPAPS

SEQ ID NO: 35062 - protein, 32 aa, Homo sapiens
VLCKMSGRGPLCFPGGHWIVFLWGGTVLWLWT

SEQ ID NO: 35063 - protein, 75 aa, Homo sapiens
MSDVGFLIISILALLGVFGRLTLQPALHCAVCIRKPAHSAGVSSINKHQPQAPLSFDGNPLEFNFQIQILGTVGS

SEQ ID NO: 35064 - protein, 35 aa, Homo sapiens
VFWLEYSAIGEDGRFVETTLPRTTFHHQICKKNHK

SEQ ID NO: 35065 - protein, 11 aa, Homo sapiens
MFMLHLALMST

SEQ ID NO: 35066 - protein, 155 aa, Homo sapiens
LLSLLSEKFVRCQPSSQLGTEQETSPASLAGVAAGVSVACAGQDARPTGLPLRGPHQPPHSRSPGRRERRGWTSGKAWRAASGKPSGLLPPPSTGESQATVNEEQRAGETSASAQEQRPATPPTGDPVDALVATLPGSPSPSEPERISVPLLLGA

SEQ ID NO: 35067 - protein, 152 aa, Homo sapiens
MDSHPTAGAWERSPICCFPGALTSWPSAPPARNVPHMQSHVGLARKKKGAPCILHSRGPQEGMGAPGCRDSTFPHQLPKNAQPPRADTAPTPAGTGLQPHSLRYVLQSRLIHPTLGRRETEAWQETRLTQRGLSRHQHRQALCRTPGSSGRK

SEQ ID NO: 35068 - protein, 37 aa, Homo sapiens
LSGLSCSAFPVLSGQMAVANPMLLILCFLCLAIEHKK

SEQ ID NO: 35069 - protein, 20 aa, Homo sapiens
IITITTLLLALPWIHPMGLC

SEQ ID NO: 35070 - protein, 22 aa, Homo sapiens
MYLCFLSSWLLVELNSSCVLFK

SEQ ID NO: 35071 - protein, 14 aa, Homo sapiens
MLKFCSGKLMMALF

SEQ ID NO: 35072 - protein, 26 aa, Homo sapiens
RFSTHFTFSSCSVLYCGALMNTITML

SEQ ID NO: 35073 - protein, 24 aa, Homo sapiens
MASVSLLCFTASFLLREVPACAGM

SEQ ID NO: 35074 - protein, 12 aa, Homo sapiens
VFWKYLLCLRGL

SEQ ID NO: 35075 - protein, 39 aa, Homo sapiens
MTFLLTCPGTLFPEISPCSGKIATSLLTALQTTPVVLCP

SEQ ID NO: 35076 - protein, 18 aa, Homo sapiens
IMSFVILIYMILKAVSMM

SEQ ID NO: 35077 - protein, 50 aa, Homo sapiens
MKGMKSFETCLCLAMWDLTASLTSWSTSLLLKDSVSTSFVLVRQALANPR

SEQ ID NO: 35078 - protein, 49 aa, Homo sapiens
IERKRKKMSRRTSIRRNEENESFKLQSRSVLFRHKIISLILSPFAFASR

SEQ ID NO: 35079 - protein, 22 aa, Homo sapiens
MKRMKVLSCRAVLCFSGTKLYR

SEQ ID NO: 35080 - protein, 14 aa, Homo sapiens
LMKMPKIVNLTLLV

SEQ ID NO: 35081 - protein, 30 aa, Homo sapiens
MASFSSSNPLVNLFLFSTRSRSLLISKRRL

SEQ ID NO: 35082 - protein, 40 aa, Homo sapiens
LGLVFIVLVSLILNKHSLKELLIPRSKFSLSKVDFRLLKE

SEQ ID NO: 35083 - protein, 17 aa, Homo sapiens
LPKVMLLTYYLSVSSVL

SEQ ID NO: 35084 - protein, 35 aa, Homo sapiens
LRAPAASPVLSLLWPSAGWVTENFPTVKNRASLDK

SEQ ID NO: 35085 - protein, 89 aa, Homo sapiens
IKLVKSASLLTCSTFLIILMSQALAGWVKMRKMKKLMRPLILLYIAQLYMLMKKNSPNIVDCLSLQLLQEKKQKEVQTLLEMKQVKSNL

SEQ ID NO: 35086 - protein, 17 aa, Homo sapiens
IILCLVITHGLSLMNLF

SEQ ID NO: 35087 - protein, 110 aa, Homo sapiens
MEGCFLERSIGGGCWEDTGNGTGLCFRSTKRHEVGRRKGRRLSTPPPAAFTGSAERQPGGARVAVRSPETCVFYCTRCALEWSLGQSGSPKKIHQKTPKKGEAVTPHVLE

SEQ ID NO: 35088 - protein, 17 aa, Homo sapiens
MLWLCVMNQIVFILGMQ

SEQ ID NO: 35089 - protein, 14 aa, Homo sapiens
LQLFQTSTWMALMM

SEQ ID NO: 35090 - protein, 8 aa, Homo sapiens
LGLLVIFL

SEQ ID NO: 35091 - protein, 32 aa, Homo sapiens
LCIWTCATFLTTAIVRMLMWNFSRECGLPTTW

SEQ ID NO: 35092 - protein, 14 aa, Homo sapiens
LVQFWHKILTVLTA

SEQ ID NO: 35093 - protein, 22 aa, Homo sapiens
VWIQIQLILMTVAMIGKSGLEI

SEQ ID NO: 35094 - protein, 7 aa, Homo sapiens
TWLFWYL

SEQ ID NO: 35095 - protein, 59 aa, Homo sapiens
RSSSSNPWRRGWRRRRLSKAVCMWCIAGHPRPLLSGGHRPWTQGPPWTAWTASAAPWAS

SEQ ID NO: 35096 - protein, 32 aa, Homo sapiens
MLRTMTTTSRSCWAWMTLWCSSTGRSTYRSTC

SEQ ID NO: 35097 - protein, 146 aa, Homo sapiens
LPAQGISGLAGLRGLAPVELWVPVFSVFFAALLWLAAAVLQACVGHSDEGCGASQCRRAALGIVPSPVSVLRTYPGLHHQDPVFGFRRPSMGKTRHQPLQQWVPLACGHQLGDPGSGPLLSPVSLCCGFWAVMSPPLKDVFTLTSG

SEQ ID NO: 35098 - protein, 18 aa, Homo sapiens
LFSVFLLSAHHMLCSLPI

SEQ ID NO: 35099 - protein, 48 aa, Homo sapiens
LPDHSSMSTSARLLLPKRRSPSGAGPGQMLWLFVAKSGFIPHLVFFLF

SEQ ID NO: 35100 - protein, 23 aa, Homo sapiens
IPNLLFCFISPLGVVRRSSPCYP

SEQ ID NO: 35101 - protein, 9 aa, Homo sapiens
IKMISIMWI

SEQ ID NO: 35102 - protein, 25 aa, Homo sapiens
MGLWLLSWRVTMKIILLSSGMPLLL

SEQ ID NO: 35103 - protein, 21 aa, Homo sapiens
MLRVMFLSILMRLWRLSFPQC

SEQ ID NO: 35104 - protein, 12 aa, Homo sapiens
INTWKRVGFILL

SEQ ID NO: 35105 - protein, 29 aa, Homo sapiens
LRCFISSLMTGLWTGGAWELSCMRCCMAW

SEQ ID NO: 35106 - protein, 28 aa, Homo sapiens
KTMDQLGVLFVLLGKCFHWNLVEDLILS

SEQ ID NO: 35107 - protein, 46 aa, Homo sapiens
IIVDLWFHLLLIFCMWQMMKKPVISDFEIVYGKMKKRKWKFFILCD

SEQ ID NO: 35108 - protein, 22 aa, Homo sapiens
ITTKWVTILLCFRVRRVLHLTG

SEQ ID NO: 35109 - protein, 24 aa, Homo sapiens
KQVKRSFTSVAHQSVLSMLISLAA

SEQ ID NO: 35110 - protein, 24 aa, Homo sapiens
LLFFSMLTWLAEASGCVIFEKGRK

SEQ ID NO: 35111 - protein, 20 aa, Homo sapiens
LTLHIKLLLLLFMKMEMVAI

SEQ ID NO: 35112 - protein, 15 aa, Homo sapiens
RKYVLRKFLCLSSLI

SEQ ID NO: 35113 - protein, 18 aa, Homo sapiens
TPRWHLAKGNSLLALMLS

SEQ ID NO: 35114 - protein, 48 aa, Homo sapiens
MESSRFLWRMLFPAKRWRSPISAVRAPAMRTTSGSSLMLASTSLWNTP

SEQ ID NO: 35115 - protein, 32 aa, Homo sapiens
RNVKSYSTHSSVMKQQTGEQWPAFQGWQSRKL

SEQ ID NO: 35116 - protein, 15 aa, Homo sapiens
LQATPDPPRAGISPR

SEQ ID NO: 35117 - protein, 30 aa, Homo sapiens
VWEHTLQSHSVSGFGCTVLCAWREEYFLFF

SEQ ID NO: 35118 - protein, 47 aa, Homo sapiens
MKMMKCNTMKGKNGAVITSTTGLTIPWKLFTTRWTTLPQTFLTWRGG

SEQ ID NO: 35119 - protein, 23 aa, Homo sapiens
IYFYSFWFHMKLFALLRLLLQTF

SEQ ID NO: 35120 - protein, 15 aa, Homo sapiens
LTSTLRGPALAMLLW

SEQ ID NO: 35121 - protein, 16 aa, Homo sapiens
LSFLSRVTHSSSLGPF

SEQ ID NO: 35122 - protein, 45 aa, Homo sapiens
LRPLSESMSTVKKMRGLLRSRLLSSLLLKAPLRLHRRDPLEDFSS

SEQ ID NO: 35123 - protein, 11 aa, Homo sapiens
LTLSFVLFLPL

SEQ ID NO: 35124 - protein, 33 aa, Homo sapiens
MERTMPQSERWRMFSFASSCGVPSQAAWLTSWF

SEQ ID NO: 35125 - protein, 45 aa, Homo sapiens
VPSQKCQIAQQLCWALAANSRSFPHCATCFVLCLMMEYLILKTQP

SEQ ID NO: 35126 - protein, 23 aa, Homo sapiens
VLGMVLHVLAIFPLQRDAQDDKI

SEQ ID NO: 35127 - protein, 32 aa, Homo sapiens
MSSPEFGPPTLGLKVDVIRGSGPPYLEDSAAI

SEQ ID NO: 35128 - protein, 53 aa, Homo sapiens
LHGCLQLSLPLFLALAPSLCHLTLPCATWALSLLPGRCGSGDLGAWGWLWESS

SEQ ID NO: 35129 - protein, 27 aa, Homo sapiens
MGTSTGCASPSLPATSLATQSSSRPLG

SEQ ID NO: 35130 - protein, 52 aa, Homo sapiens
RTEPRSSARPRTAMMMMMSLSPWTETASWMSSLSRWRRFEASLTRSQRTWRR

SEQ ID NO: 35131 - protein, 114 aa, Homo sapiens
KMRLAWLYLFFLFCFGFFFFFGLTQDLKTGTVKVTAVGWSEHPPKFTMWPRTLIAHCCFFNSHSKYEMRCYRKSLAILKATPLLSKENGPVLSQVHTGEVIALLSCKLCNAKFF

SEQ ID NO: 35132 - protein, 10 aa, Homo sapiens
LYHLILLAFL

SEQ ID NO: 35133 - protein, 46 aa, Homo sapiens
KIPSPSPRRKRMRRKKRRVWSGATRKVLSGVWCFLMLMGNTSLLLT

SEQ ID NO: 35134 - protein, 16 aa, Homo sapiens
ISRPLRLCRSLALVLG

SEQ ID NO: 35135 - protein, 69 aa, Homo sapiens
VISFVVVMESVYQKPGNVITWMNVEIVPMKRSVPKKQILQLLLLFNPVLTTSSSVYPVLPKFTLASPNL

SEQ ID NO: 35136 - protein, 41 aa, Homo sapiens
MSKKEERRSPRNISMKLGIVGHLYYLGGSVLALSLKHLTKK

SEQ ID NO: 35137 - protein, 17 aa, Homo sapiens
MMLMVMEILMWMMPKFY

SEQ ID NO: 35138 - protein, 8 aa, Homo sapiens
TWTLWMAL

SEQ ID NO: 35139 - protein, 59 aa, Homo sapiens
MMTALVTVPPSSPSTCMALASPTFIYPLSSCHHLAPEWAGHGGQHAVGLEWWKGRNRSQ

SEQ ID NO: 35140 - protein, 17 aa, Homo sapiens
VATPAQSWILALAPLAT

SEQ ID NO: 35141 - protein, 36 aa, Homo sapiens
VTVMARAAAWTASASATRASQAWTVASTPAPVTATT

SEQ ID NO: 35142 - protein, 36 aa, Homo sapiens
LFVCLFLPLGSAPALASRKPQHPFLQRGFLERRDAA

SEQ ID NO: 35143 - protein, 12 aa, Homo sapiens
MLTSILFILQCL

SEQ ID NO: 35144 - protein, 85 aa, Homo sapiens
ILRTQIPHSPMAAWTLLQARQTSAKPNRPETTLAPPYPHWNAVMKTCAITEGCTMFSLLPGVRPQDKETGISMMVAETLSPRCRS

SEQ ID NO: 35145 - protein, 37 aa, Homo sapiens
ILSLLVSTWILHLLRVIYTKSYRGLCFVTLEEFFTET

SEQ ID NO: 35146 - protein, 37 aa, Homo sapiens
MRGVERSPPPTLAISAVLLGPLKEAEAKMTFQIFQPF

SEQ ID NO: 35147 - protein, 36 aa, Homo sapiens
MMLLSGAMSLTWAFRIRCAWLVGVSLRRGYWRCRWR

SEQ ID NO: 35148 - protein, 10 aa, Homo sapiens
MGLLLMSLYG

SEQ ID NO: 35149 - protein, 18 aa, Homo sapiens
MRSSASGFIILTLCGQIV

SEQ ID NO: 35150 - protein, 58 aa, Homo sapiens
MLFTCVLAAPLPHTTPEPWGKTRMRSRPRRGRFLRTLSRHPRAKVPSRPSTFSHDTWT

SEQ ID NO: 35151 - protein, 23 aa, Homo sapiens
KVMLFKAMVIILSSNSILKILKL

SEQ ID NO: 35152 - protein, 20 aa, Homo sapiens
VERTRFKKGMPRTQPWEVPV

SEQ ID NO: 35153 - protein, 12 aa, Homo sapiens
LGGFWLSLLYWP

SEQ ID NO: 35154 - protein, 19 aa, Homo sapiens
IIKMTMVFTAGMAQAAMWK

SEQ ID NO: 35155 - protein, 24 aa, Homo sapiens
ISQTMDFSSISFLTVLFLSLYFHI

SEQ ID NO: 35156 - protein, 12 aa, Homo sapiens
VCLLGRLYWAAL

SEQ ID NO: 35157 - protein, 44 aa, Homo sapiens
MVQETLSHQVTQQMNMLIGVELQRLLVFQVFLFIQLDTMMHRSS

SEQ ID NO: 35158 - protein, 49 aa, Homo sapiens
IMLFCLWAMALTQPLGWITGLLKTAGAPAGVRMATSGSAEELMSVQLRA

SEQ ID NO: 35159 - protein, 22 aa, Homo sapiens
LFLGSLGMSACLRLLLVGWKER

SEQ ID NO: 35160 - protein, 26 aa, Homo sapiens
RLTLMCLDPVWTLMLLIWILRDQKES

SEQ ID NO: 35161 - protein, 31 aa, Homo sapiens
MTELASTFLFMSTSLETATRMPWLLLPRSYR

SEQ ID NO: 35162 - protein, 30 aa, Homo sapiens
MTELASTFLFMSTSLETATRMPWLLLPRSA

SEQ ID NO: 35163 - protein, 31 aa, Homo sapiens
KRGRSCCVVGALLLTVVTSSSPLCLEMCRMA

SEQ ID NO: 35164 - protein, 57 aa, Homo sapiens
RSAAATAAVALEGEVEDLLSSSQTRERPGRGARSWGDEAIAGAWASCWLPIFYFLSL

SEQ ID NO: 35165 - protein, 11 aa, Homo sapiens
LIAVILATMQV

SEQ ID NO: 35166 - protein, 47 aa, Homo sapiens
MVFSIRGFSECLVPRWKSMILKIHLREVKILWLMTRVTMILTQLLAF

SEQ ID NO: 35167 - protein, 25 aa, Homo sapiens
MGSTFSGLTGCGGQCSGPTSTWAAT

SEQ ID NO: 35168 - protein, 36 aa, Homo sapiens
TPSLAFLLSLISLFQRRPNLKSFPGSGSVHLIRQPK

SEQ ID NO: 35169 - protein, 15 aa, Homo sapiens
IPWLPAYSWLLSTCW

SEQ ID NO: 35170 - protein, 27 aa, Homo sapiens
RNSKNLGCPFLGPGGVVLLGQHSLGHL

SEQ ID NO: 35171 - protein, 44 aa, Homo sapiens
MEKLTLWLWLQRKMGPLCSSFLNGGSRARPSKKWQKPTDPWVQS

SEQ ID NO: 35172 - protein, 89 aa, Homo sapiens
MAAVMSTSLARSSTAVMAAGPTAAAAPMSTVSPAACSPTSNFSWSASSTGQPWHSRTSSWQSKITLSCAWPNAGPHLRACSMRTPTGTP

SEQ ID NO: 35173 - protein, 32 aa, Homo sapiens
TMHLQILYSLMLLGTVLWTNLKSKGQAENRKV

SEQ ID NO: 35174 - protein, 21 aa, Homo sapiens
ILLQCRARFLLLLVLSQTQDL

SEQ ID NO: 35175 - protein, 76 aa, Homo sapiens
LLLLLLNFYFNQRLSEPVGLGPQLLKRFSVSSRAGKHPPSWVSSVQGRGRHWTMWYGSFVGSVEAGPGLFPKVVGG

SEQ ID NO: 35176 - protein, 36 aa, Homo sapiens
MMAGPSKLCPLLRLCHIGPGAEGKQVLYNLGTVTPP

SEQ ID NO: 35177 - protein, 48 aa, Homo sapiens
LPSLRRPHLARIWNRPAGRAGARAHPGPAAPGALPGAGAAPGAAGPGP

SEQ ID NO: 35178 - protein, 51 aa, Homo sapiens
LPSTLCSPSLCIKFPPRDAALLPRPPLSHFSWCGLGFLGFLFYLVCVVHQL

SEQ ID NO: 35179 - protein, 70 aa, Homo sapiens
MTSLYLLCSCSKLLGAFGLFTVFKQSLTSAVTVGFLERSSARVRLRRCNYRVSGAASSWDSGGGNWYPWQ

SEQ ID NO: 35180 - protein, 17 aa, Homo sapiens
MKMKWGLGAFILLMAQN

SEQ ID NO: 35181 - protein, 25 aa, Homo sapiens
IARYVKRSLSLCVFIGTANGVGKRN

SEQ ID NO: 35182 - protein, 21 aa, Homo sapiens
MWRPWEVLLWKLLLQGWLAWR

SEQ ID NO: 35183 - protein, 35 aa, Homo sapiens
IWWPSGWAAHWVLVSTSWLELWPVRMQALPLSSPS

SEQ ID NO: 35184 - protein, 24 aa, Homo sapiens
MPWLHLLMIWISGFTSEMNLCVVD

SEQ ID NO: 35185 - protein, 9 aa, Homo sapiens
LCWLWLWQM

SEQ ID NO: 35186 - protein, 14 aa, Homo sapiens
MVLLLLLFVNSNEP

SEQ ID NO: 35187 - protein, 27 aa, Homo sapiens
KSGWRNSVSWGLVDWCWLCPLPLGLGQ

SEQ ID NO: 35188 - protein, 60 aa, Homo sapiens
IMTRSWLIVVSGVGTKAQMSVPFNRFWAPKRNTSALVRTGIKSPSVDRKRLCYMNVALVI

SEQ ID NO: 35189 - protein, 43 aa, Homo sapiens
LKTSIPLLSLLEMLVPRTVPQVLGPPESCQSRPPSPLSQGCSL

SEQ ID NO: 35190 - protein, 18 aa, Homo sapiens
IPVHFMLWLCRAQCFSFV

SEQ ID NO: 35191 - protein, 25 aa, Homo sapiens
LESLSRQRECWRMLVLWALLSSSGL

SEQ ID NO: 35192 - protein, 67 aa, Homo sapiens
MGGSSPRPCILKAAYLRACGLAAGTHPRGGAAIVSGAPAQAGRSSCFPLLCCLPGVPTWPRSVLPAP

SEQ ID NO: 35193 - protein, 25 aa, Homo sapiens
MLPKLISNFLAQVICLPSKVLGLQA

SEQ ID NO: 35194 - protein, 8 aa, Homo sapiens
LMILGVLL

SEQ ID NO: 35195 - protein, 9 aa, Homo sapiens
IMIFLMEMI

SEQ ID NO: 35196 - protein, 10 aa, Homo sapiens
MIWCIIILLR

SEQ ID NO: 35197 - protein, 24 aa, Homo sapiens
RMRTRRPPGVAAAGVLALCRSEVE

SEQ ID NO: 35198 - protein, 38 aa, Homo sapiens
MKFDFTLEMTLWMFGIGISAGQSRTILKVGRRVICQRY

SEQ ID NO: 35199 - protein, 95 aa, Homo sapiens
LSPRVGAARQGQPSTTGSPAVSRLTGRCCVGGAALAWVCMWVQPWEHCGSASQEPWRSRSLKTQWWHWWAPMPPCAAPSPLSLASAWHSSTSSGS

SEQ ID NO: 35200 - protein, 23 aa, Homo sapiens
MVWLVWPSLLAPSTLSLWATSMT

SEQ ID NO: 35201 - protein, 23 aa, Homo sapiens
LFLHHLCLFLVTILLRFPTASNS

SEQ ID NO: 35202 - protein, 30 aa, Homo sapiens
LPTRTRTTGPGCAAGMCGWTAAGLLTMALA

SEQ ID NO: 35203 - protein, 26 aa, Homo sapiens
ISLSNPLPSWVTLAVGLGSLPWVVKM

SEQ ID NO: 35204 - protein, 30 aa, Homo sapiens
TVPSGLILVLMGRIAGPRSTRRVGACCSPP

SEQ ID NO: 35205 - protein, 23 aa, Homo sapiens
IAAVLGSILRLVLIRDIESLVPI

SEQ ID NO: 35206 - protein, 36 aa, Homo sapiens
IMLGRYPMTWMAFVKGTGMCFLWISSSLCRAASCLS

SEQ ID NO: 35207 - protein, 9 aa, Homo sapiens
TILGVVVGL

SEQ ID NO: 35208 - protein, 12 aa, Homo sapiens
MGGVGLVLLWLS

SEQ ID NO: 35209 - protein, 126 aa, Homo sapiens
MLAVPVRLKVGSRKPEWGTNRLTSCPAKDPLDRRLQNLRDRERVPEPQRSLRPGVQEDSREHGQVPEVSDPQVDLEFVDLQAKPRYRRLILKTQIPEASDSQAAQKPQAHRQIPETTEAGRETTSN

SEQ ID NO: 35210 - protein, 44 aa, Homo sapiens
MPSPGSRLTKSLFWLLECIEASPLCTISACHHFRGVGVRGQSSG

SEQ ID NO: 35211 - protein, 41 aa, Homo sapiens
MTTYATLPIYLLVLHQSKARKRMVPLTHIHLRDEDWYLTIS

SEQ ID NO: 35212 - protein, 57 aa, Homo sapiens
KKLHKAREITAGGKSMMGSRVLRTGKLLEAAGAGPGSPALAVFAFGRGQSLLFQVPA

SEQ ID NO: 35213 - protein, 12 aa, Homo sapiens
LLNFFILNFQIL

SEQ ID NO: 35214 - protein, 9 aa, Homo sapiens
LKTALLIAL

SEQ ID NO: 35215 - protein, 31 aa, Homo sapiens
KTWGEIISLSRPCYAVYLGVLYVLLPMPSLK

SEQ ID NO: 35216 - protein, 63 aa, Homo sapiens
TTMRSTLAASIPTISSQGSSGHPFTKDWIVLWKSVLYMGITPSSFRFTQKRGSTVMGNWAMNQ

SEQ ID NO: 35217 - protein, 24 aa, Homo sapiens
MMLRVLIMTMMPSWVLKKQRPLIS

SEQ ID NO: 35218 - protein, 50 aa, Homo sapiens
LPPGRILSGVFSTLSLLPVHSWVPLQHCHISLLMHLFPPCHSTWSLEQEA

SEQ ID NO: 35219 - protein, 50 aa, Homo sapiens
IIYNMILSHLLHLCAHTCEGLGPASTTALPQTQLSTSRQDGITVTGGPEV

SEQ ID NO: 35220 - protein, 18 aa, Homo sapiens
RCFVVSVFLLFTLPESVL

SEQ ID NO: 35221 - protein, 59 aa, Homo sapiens
MPLTPAGPTPIMILCPKLIYTSGSSSLLKTNAQMLFTDIYILVSLSCPTLLLFPIPNSS

SEQ ID NO: 35222 - protein, 69 aa, Homo sapiens
KRSSRRARTAAARRSTTTRGGAAASGCCSSASTSSASSWRASPSSSSRQAPSSLTTEGFTAMMRASSTH

SEQ ID NO: 35223 - protein, 12 aa, Homo sapiens
MVYLMLKMSLVF

SEQ ID NO: 35224 - protein, 23 aa, Homo sapiens
LPFPVSIFLYFLSFYYHHAMPLE

SEQ ID NO: 35225 - protein, 63 aa, Homo sapiens
MGVWSEQDPNRSFIPAWFILLIWQTCPAESTQASSVSQIILGQQMNKKEDVLLSGVWLADLIT

SEQ ID NO: 35226 - protein, 37 aa, Homo sapiens
MSWHQLGPSHPHTLVLSRVIFPTLEELIIFMNVFSLL

SEQ ID NO: 35227 - protein, 53 aa, Homo sapiens
MMLMSLSEILSVLFLLHCTEPLRVECEVLIYVCLVELSYQEHIDALKDNPRRV

SEQ ID NO: 35228 - protein, 55 aa, Homo sapiens
MQISVFLPAAWLQLILAGEETSQLSQIGRKNMECVLPLTEHNQMNCPDSSLQTSS

SEQ ID NO: 35229 - protein, 28 aa, Homo sapiens
MNNSRRAALRAVTLTAKVSSFTAEPARL

SEQ ID NO: 35230 - protein, 97 aa, Homo sapiens
RESNAMDRWGQNGLFPRRRHLFAPFLNLISSVFLHRFCTLGTKKPSGTLLRKDCRREDQRGSWNLFQRKLTNSEHLQLKLPLDVISVACIIPLIEQS

SEQ ID NO: 35231 - protein, 74 aa, Homo sapiens
LKMKVPAHGPPLIASPSRPRAPRGARGRRGPAFAAVAAGAATEAAAAAAAAPAPLAPARRAAAAARGPPLPRLP

SEQ ID NO: 35232 - protein, 37 aa, Homo sapiens
TSVFLISALKASASPFWSSLASRSMRDTSPYEDLGRF

SEQ ID NO: 35233 - protein, 81 aa, Homo sapiens
MDDKTTRICHLLAKRKPPPPHPSSMPGHSWGQSDVAGVGMPKMKLGRMTQSGRRGLGLQVSALASVGPHSFASFAPCLSFL

SEQ ID NO: 35234 - protein, 78 aa, Homo sapiens
MFALPATYDVKFGENVVFFCFFCVFFIFVFLFFYFSLKVIHLFWRSLYHSLSPRADVPSGSNLYRRKHVGFRTRQIWI

SEQ ID NO: 35235 - protein, 127 aa, Homo sapiens
MLFLASFTATALITLAYKLPVVAPSSEEAIVLYFVEYYTKPYCRFGPVLVGLFLSIYMHQNHQENILRTKVLLSPEMQVLLGWSCSLVTLFAVAALAYMVDDSSASSLVAAALYQALHRTLWAAAVG

SEQ ID NO: 35236 - protein, 45 aa, Homo sapiens [sequence omitted]

SEQ ID NO: 35237 - protein, 61 aa, Homo sapiens
LVLLQKWPLWSCSETRPWAPLQPLSMTPSGFGWLWGRGPRGGLALSVVAASSLATMANAEI

SEQ ID NO: 35238 - protein, 32 aa, Homo sapiens
VKENSCESSQSRPCLLHYQMLKFFKNQSFGGI

SEQ ID NO: 35239 - protein, 80 aa, Homo sapiens
TGSPAVSRLTGRCCVGGAALAWVCMWVQPWEHCGSASQEPWRSRSLKTQWWHWWAPMPPCAAPSPLSLASAWHSSTSSGS

SEQ ID NO: 35240 - protein, 36 aa, Homo sapiens
LQLLPGNMSRAAAATAAAATWGRAAAAAAAAGTRGQ

SEQ ID NO: 35241 - protein, 22 aa, Homo sapiens
MPWFWWLCWAGCLSPSILRLGW

SEQ ID NO: 35242 - protein, 58 aa, Homo sapiens
MRLEPPSLLVTLEVATLWGWPGLGQLQASPLEALNGMPWFWWLCWAGCLSPSILRLGW

SEQ ID NO: 35243 - protein, 68 aa, Homo sapiens
MTSTPMQPLQLLQDMLLLGAMATQSSSQSPQRHLGQLPPPLQQLLPLQHLASTSLSSCRQTECNRPAI

SEQ ID NO: 35244 - protein, 33 aa, Homo sapiens
MRGGTRFTLGLADLCTTGARALLRKAGFPLYLH

SEQ ID NO: 35245 - protein, 35 aa, Homo sapiens
MKEVPLPASLPGWAIAAASLITAFSAWTRRMKVPL

SEQ ID NO: 35246 - protein, 67 aa, Homo sapiens
MHFLRGLCVAGGVPGYTARGSNCQTPEPTGSRGSRVAGSRPGLPAHRGPDWLLLRATAPGSAAPRAA

SEQ ID NO: 35247 - protein, 13 aa, Homo sapiens
MKCSFLTFLLQLV

SEQ ID NO: 35248 - protein, 32 aa, Homo sapiens
MNSGLLAAVSWAPGSLLLVENRGRLAKGPAAC

SEQ ID NO: 35249 - protein, 49 aa, Homo sapiens
MRPSSRAPVLLLLLLLRLLLRPERLSSRQAAALLSRAQTGPSQRDLSDS

SEQ ID NO: 35250 - protein, 38 aa, Homo sapiens
MELVVSWRAAWRRPGGASTLSGAGMSLSSSLKKRRPKS

SEQ ID NO: 35251 - protein, 65 aa, Homo sapiens
LGLRRRLRRGGCRWAGCLASLCAAWALSRDGRAGPGGRLSPAGDRRAGGSGTCRPGARVPVLGAE

SEQ ID NO: 35252 - protein, 40 aa, Homo sapiens
MVCRALAAAFLLLEAAKGGSGESTWSFQRWGSGCSRPKPS

SEQ ID NO: 35253 - protein, 117 aa, Homo sapiens
LGSGLAGALLGGPAASRGVRGARGLAVAELQHQLPSAGARWPGDLAAPKRDPEGFALVGAAAGGHSRAGDSARLLLPLRAAHTTGAWAHSHFPATRSRRADAAASLAAGGRELHPEL

SEQ ID NO: 35254 - protein, 139 aa, Homo sapiens
LNSLLSLACSPEALAPQCWAYLAILCQPPGHPPSQWKLLPPLTMVFLALGSGDKTISFHSWTTLCTQSAASYLPSCTGSEPPDLDFALGSFLGTCCSLASLEGSTGLGVRRWSSGCCFPTLGPWACSVLCIRCFLPASP

SEQ ID NO: 35255 - protein, 33 aa, Homo sapiens
MALAKSRWYSLVFKMLSIKFFGIITSSRTGCLP

SEQ ID NO: 35256 - protein, 46 aa, Homo sapiens
LRRDDKESGQGGMTLIDSKASLICQAEGALLVFLGLFQRGQLSSGK

SEQ ID NO: 35257 - protein, 21 aa, Homo sapiens
MGKWRENLKEPQTRGPIAPQE

SEQ ID NO: 35258 - protein, 58 aa, Homo sapiens
LGRNHISVMNVGKPSVKNQLSLNIRGLTQGRSRMSVMHVGRPLVRGQCSPNIREFTQG

SEQ ID NO: 35259 - protein, 27 aa, Homo sapiens
LTTRMKNEEVLRSNDCEETHPLSWHSQ

SEQ ID NO: 35260 - protein, 42 aa, Homo sapiens
LTRSPTMRAHLLSWSFRSLFGDPVSLLAGCVQSPLGTVVGLV

SEQ ID NO: 35261 - protein, 112 aa, Homo sapiens
LCVLWVLGVTFSLGSRESPADGFCPGLKQPESYGKGRAWLARGIFQVLKRQAYGACDPSRRTKWDLKIHSTSAHGGPGPAPARGHTADWAAGMPGLCWRPLWLAFTSVCLQE

SEQ ID NO: 35262 - protein, 28 aa, Homo sapiens
MGLPGVIPSCAAVLWSSIHLSSSALSPT

SEQ ID NO: 35263 - protein, 58 aa, Homo sapiens
LAPGPSAAAPTRVGPVPASAPRASPEWAAATFAVAWAAAMVGPAAWEASPQLRSTRAC

SEQ ID NO: 35264 - protein, 26 aa, Homo sapiens
LRFFLVFCILFITMQETISSQEDFYL

SEQ ID NO: 35265 - protein, 38 aa, Homo sapiens
LRVVVALGAVWSRSGPGLTAAWSVRHEEKPFFELLVVI

SEQ ID NO: 35266 - protein, 29 aa, Homo sapiens
LRVVVALGAVWSRSGPGLTAAWSVRHEEK

SEQ ID NO: 35267 - protein, 112 aa, Homo sapiens
LGLGMWYRLLAAAGSRAVARPLALLWRCGGPGGGRTAKTSARALGKARQWLWPVRMCGVALQKKLGKLIWPPVPVLPGDPRSEADSAGKTDVIFLVAVFKTTQRYLSFIHHH

SEQ ID NO: 35268 - protein, 105 aa, Homo sapiens
LGLGMWYRLLAAAGSRAVARPLALLWRCGGPGGGRTAKTSARALGKARQWLWPVRMCGVALQKKLGKLIWPPVPVLPGDPRSEADSAGKTDVIFLVAVFKTTQRV

SEQ ID NO: 35269 - protein, 69 aa, Homo sapiens
MSRALQTQAAVSPASRAGTGPSASSPACLAPLARAANSSALTADMGRPVSQILATVSAVTLAGWGPGVL

SEQ ID NO: 35270 - protein, 100 aa, Homo sapiens
VQGPLAASSGPSSLPASPTPLGPEPPGSGGGCAEVRRPEPGSCRGSGWQQPCYRLDGAQDRAPRRGLGMGGGALSVLPVGACVWGAPLLWGLLRGVCGGV

SEQ ID NO: 35271 - protein, 25 aa, Homo sapiens
MTGSVMLVVTIITLPPLPWIIPLWG

SEQ ID NO: 35272 - protein, 167 aa, Homo sapiens
LRRGAGHTRLILRGCCLDEKRWGCWRLLAAHIWLGFAPCASVPLSPSLPLLSRNRASASGRRDLGDRAGETEVLWVGGTCGCSYRPPPSSSALPSSGRPFPLLCFLHRVCASPRTWPGGGLAGGRCSRGGAGGAAGGTEGPAGRWAPVDRDSCWRTACSLPLPLAWS

SEQ ID NO: 35273 - protein, 26 aa, Homo sapiens
LTWIPLCRKEGDSSPHLLLRLGLATW

SEQ ID NO: 35274 - protein, 38 aa, Homo sapiens
MWRGLCLSLQLELQVSPSLPCVLCSQRPSLCGPVTCRY

SEQ ID NO: 35275 - protein, 35 aa, Homo sapiens
LTSARRAEPRALSRYLRPARAATLCPAFAIFCWQR

SEQ ID NO: 35276 - protein, 83 aa, Homo sapiens
MLSEGKPIPRREGKTATTERTFAVPVWKEIGISWRGLASTAGLFKSSTSILEENNADSRKMACHFGMCLAALLIKGKVLFFTF

SEQ ID NO: 35277 - protein, 37 aa, Homo sapiens
LSWSEGWLFRLSFLPACTPPTASEEGAAPGCVHFLGT

SEQ ID NO: 35278 - protein, 311 aa, Homo sapiens
LARPGLHYACKPGVRVPAVPRVAAWGRAGVGRRAAGRLPHLPLPRLLLHGQRDLLPTQALPRGARQGALLAALPAPHPAAQPADAAAQRRPPLLHAGLSRPQERGRGRRQRRGPTERGRARRLLGRQGQLRGRNQALDYEPGPLGIPRGRAHPPPQPLTHTRTPRDHKATAAVTAAQRPGWAEEETPMPLRGKWRPGHQRPRCLDLLGVEWGRKMSAGKALQPHSSRLSAPPFLHFCRGLPLPFSPFPLGFIHFLASFLCLHFSSCLHSSLSLSLSLLFLSFFLPLPAFPFSVPWVCVSASPSYPLPDCTP

SEQ ID NO: 35279 - protein, 49 aa, Homo sapiens
MGGKSAWTQMLPESRKLYRKNWQVMNLLINLFCFCQTSLTPRKGRILKP

SEQ ID NO: 35280 - protein, 20 aa, Homo sapiens
MVRRLECAAARRRELQNGRR

SEQ ID NO: 35281 - protein, 13 aa, Homo sapiens
LSELRFVLVLCTL

SEQ ID NO: 35282 - protein, 181 aa, Homo sapiens
VPGPAGSLPSSAFRSPTPGRLPGGPGATQPLARPTLCADPGCKRSPGLWSRRSCEGDQPRPLRGHRGGREGKGLWVSTLFGLRTDGVYSMQGVINSNSPFRSFIPYMLNDNLVPNAGMLKLREGRCLASTAATPRVSLLFPGLQCSGTISAHRNLRLPSSSDSPASASPVSGITVKLKQAQ

SEQ ID NO: 35283 - protein, 87 aa, Homo sapiens
LPVPAWPLSKAGILSWPGLPACPPTMLATHLLFSPLRSRHHGFLQSSAGGASTLGLPAARGQGLQCAPLHFPAHSWGQSGAGRSGRG

SEQ ID NO: 35284 - protein, 79 aa, Homo sapiens
VRACVCVCVCVCVCVCGARVPRASRQSPGASPCCLPHPSSLQAPFLHPSRAPTVADRARTPLSRCGGRAGWHETKGARG

SEQ ID NO: 35285 - protein, 37 aa, Homo sapiens
MCAFKPLIVRCWILEAVMAQMHILAEDNQLSDFTSLF

SEQ ID NO: 35286 - protein, 55 aa, Homo sapiens
MDPPWRGSGASAGWLWASGGPLSPVPRPANAVPLGSGAATLLLASWHFRDWSLTV

SEQ ID NO: 35287 - protein, 35 aa, Homo sapiens
MRSLGPLAALPSCSLWTLFLYHNSSRGLKCDVHKS

SEQ ID NO: 35288 - protein, 175 aa, Homo sapiens
LPQCFKPFFVFLLFLLFLRPAGRGRGGAQDDSPGSAWLPASFCKCFFFLHLGPSRGWKEKRGWERMESMTASGAPGGSGEEGVEGQWLRGFLLQPSAGLRVGVTGGGGGFLPHCSGLQCFLGILTVCGFSVTNLESCICSHDSANNEYLLCVEAAGQPVITGKEARRAVWPGSPI

SEQ ID NO: 35289 - protein, 141 aa, Homo sapiens
LSQMRLCTVDFRVQGRRYFSRLSLMGAFLLATSLKWNLLVALLPLQLWCYTEKLEETGFHYVAQSGPKLLVSSSPPISAFQSARIIGMSHYIQLLLVSSDSCFDTTDLSFKTDKGKRETSESLIKVEASYFYQRIHCAWTL

SEQ ID NO: 35290 - protein, 53 aa, Homo sapiens
LGELGPVKRLRCFSSSLIVSGSSSSSFQLILNSLSFSFLLFMTVSGFLTPLPS

SEQ ID NO: 35291 - protein, 44 aa, Homo sapiens
VELTIPQTSKPLQNPRRNRIQKDLLLLWISSKVLLWSSFKTRIP

SEQ ID NO: 35292 - protein, 36 aa, Homo sapiens
MKKGFKAGCLRRGVTFLQILHAVHLCPRRTTAAHDS

SEQ ID NO: 35293 - protein, 49 aa, Homo sapiens
LNKIWSMFVSLYLISPESGNYLYLLSVYCVPGTISMCIEKPWKAIQQYI

SEQ ID NO: 35294 - protein, 12 aa, Homo sapiens
MEACDFPGIMHD

SEQ ID NO: 35295 - protein, 80 aa, Homo sapiens
LHTHEYKEPYDLRVSFFHFFSSLILCVFSNFLKIEICSSVGVALVGGSMLGGRRNALYRLKPFIRKALICDVLGEHRICK

SEQ ID NO: 35296 - protein, 55 aa, Homo sapiens
LDRGGWGVRGAVGSPDSPRHSLLCSRMWAWALQAGWVWAAWCACGGCIPTAGTEA

SEQ ID NO: 35297 - protein, 74 aa, Homo sapiens
MHFIHPCVRLPACASIHPSIRPSIHPSIHPCILFPARRQRTHSLLGEEVINLGLGGCPIQLRSPLRSLLQIGSD

SEQ ID NO: 35298 - protein, 53 aa, Homo sapiens
MSSLEVKLSEMGMNLCPTCLFTSTLITTLGQSQLQSRRCWRRMLHPWTEATVS

SEQ ID NO: 35299 - protein, 209 aa, Homo sapiens
VWRRGGRILFPTSFSSPVLPSAFLVLVELGFLSSPVPQHCQKSVYVPLGGAAPSLLGRQGKNRCPHRGLCHVPSLWWLRRKAGKLPQPCRYVWHLLARALKGSAVCFLYWDQSKNPSTFPLQLGEALLPSQSREAAYQTQPKTLFTWVGRWSREVQSGMVRTWAIATKMGTSWVGRSLPLLTELGLGRVIAPTIAMGGGGTGSASSLSK

SEQ ID NO: 35300 - protein, 87 aa, Homo sapiens
LMVALNLILVPCCAAWCDPRRIHSQDDVLRSSAADTGSAMQRREAWAGWRRSQPFSVGLPSAERLENQPGKLSWRSLVGEGHRICDL

SEQ ID NO: 35301 - protein, 40 aa, Homo sapiens
LATVFLLICDSLLLLCSFTSCVSREMKERPANSLQPVDSK

SEQ ID NO: 35302 - protein, 33 aa, Homo sapiens
MFFSRAFGWCVALPTFTFWTSSLRNALSDHAEV

SEQ ID NO: 35303 - protein, 106 aa, Homo sapiens
LLFLQQSAMTAFALSMLSAHHLLPLPLQWLTLETKTKTPQPFSSTSQISTDKDKGLNPQLLKMDPGHMGWSDTPAQLSAGEEAQKRFRGLKDILLPCPYEQAISAP

SEQ ID NO: 35304 - protein, 76 aa, Homo sapiens
MPVVVFLCVLIHSKGSRCRMPLLLWGQTLLSLSVSISTVLPQHQSMHQGSTQAQLSPPPSSSLTFTKGWLSSPWVP

SEQ ID NO: 35305 - protein, 53 aa, Homo sapiens
LPGRFLLSPFVLPTPVYPSSFKFMSLSQRGFPVLALFLSGSLALFHHASNHSL

SEQ ID NO: 35306 - protein, 80 aa, Homo sapiens
MPPTVRRGCWARPGWSLGLAGAAQNCLLRKRCSPGPPLSPGLSKASEVLPSSRLDSSVICLRPHSRVQLETEKPARGRGR

SEQ ID NO: 35307 - protein, 26 aa, Homo sapiens
LLLCSLGMLLCLCIWSLFGATVDRHL

SEQ ID NO: 35308 - protein, 44 aa, Homo sapiens
LKIRRCNKMFLAFPPAFFFFFDFALESQSFRIFFTILFKKSFTV

SEQ ID NO: 35309 - protein, 27 aa, Homo sapiens
LRRIAGLCTGQFLCLLPGSGVRVQEAI

SEQ ID NO: 35310 - protein, 98 aa, Homo sapiens
LHHHLGFVLFCFLVKKGGENPAHPSPPFFKRVMKTEGSGVTNLADGRCFGGTPGLRDSTQANSRLGLFFPPSFPLAPSAAGGGDVEGRRPASVTGARK

SEQ ID NO: 35311 - protein, 18 aa, Homo sapiens
MGSPTAEQMVVTKVNKEV

SEQ ID NO: 35312 - protein, 62 aa, Homo sapiens
LAFQWPSWNGRKLSWTLCHIVRFPQQPDEAAAEKMEAILVNGSHLSSWQRKKRKDPLVRNGD

SEQ ID NO: 35313 - protein, 58 aa, Homo sapiens
LIVPPQPPGMFHHNPVATSECIFVIPLATISIAPSLLLTRLLPLLGAGERNRKLNLGF

SEQ ID NO: 35314 - protein, 29 aa, Homo sapiens
LYHMMCFTYAVVYIPNISIFDFILIHLVQ

SEQ ID NO: 35315 - protein, 46 aa, Homo sapiens
MLLARNPGSATLENSSSHNNFIQFIFKAQLYFMLSVIIFLDTFQIL

SEQ ID NO: 35316 - protein, 29 aa, Homo sapiens
LNCLGCTAILTAASIIAFFSTIRLSKAKE

SEQ ID NO: 35317 - protein, 69 aa, Homo sapiens
LLVLSSSSLAGHRDFWTGNCTILFSQQGGSRDCPPRKSGGLGIWWVCSLAVAWGSVCVSGVGSGNVLRI

SEQ ID NO: 35318 - protein, 52 aa, Homo sapiens
LAGHRDFWTGNCTILFSQQGGSRDCPPRKSGGLGIWWVCSLAVAWGSVTVPW

SEQ ID NO: 35319 - protein, 57 aa, Homo sapiens
LQSSVGFFPFLLLFITPPPFSPFSGLRVEPANFEEEVAKWEKRGVRVWGFFVFVFVF

SEQ ID NO: 35320 - protein, 59 aa, Homo sapiens
LLFYIFWEARKAFGKRITFPRFSDSRLFATALACGTLPGMHSLSIPNRATCNLCFCKRS

SEQ ID NO: 35321 - protein, 77 aa, Homo sapiens
LTCPVLVMISLLTEAVPQKQTCNRRNRSQCHPSAVVTSKKVSRHGQMSPGGQNHPQLRTTALNYGVSLCHPGWSTVA

SEQ ID NO: 35322 - protein, 22 aa, Homo sapiens
MRSIQSICTGIVRPACQGGLGG

SEQ ID NO: 35323 - protein, 22 aa, Homo sapiens
LPVLGWVLDLLLLLAFGALCHA

SEQ ID NO: 35324 - protein, 101 aa, Homo sapiens
MPFAPVSRETPGLQLLVCGARGGVSWGNSNGGLAVRAALLAGAAGGLGAFGSPAAAVPRCRSGAGGGRGGKGAGGGLVAARSVPRRGLPPAGLPHAVGLPS

SEQ ID NO: 35325 - protein, 110 aa, Homo sapiens
MDLWTLVAVTQCQGIYLALNSGQKKTQTLSCGLGPPILIKVWFHLLPHKGAIAVCTSESVYNLRIEIIACSSKPFTVEWKPVIFLASCMTEKVSVANSELQHQETRSSSH

SEQ ID NO: 35326 - protein, 46 aa, Homo sapiens
LAVCALRLHLYVGSLGSISAVVFELAGRAFERLVAFGFTWLRRDDH

SEQ ID NO: 35327 - protein, 44 aa, Homo sapiens
VYFWRFSPVFSWTIYACPAPHRAILRSLWALSLSLFFFLEVAEW

SEQ ID NO: 35328 - protein, 98 aa, Homo sapiens
VTTTMAAAVVAAAVAAAVAAAVAAAVVAAVATVVAAEVTAAVSPPGDPAPAPPPATTVGAAEEMDINPGTLRRLLGCLTLTLSGRILNPSWVSSTGMP

SEQ ID NO: 35329 - protein, 96 aa, Homo sapiens
LEQSQWNVTIAQVGIFVCFVHCCTPSPQHSACPGQVPSKHLGSNASVLPAAPANRPPTQALPSASTATTAAHLCWHRSLFPGLPEIPSPHSARGSY

SEQ ID NO: 35330 - protein, 88 aa, Homo sapiens
LVAGLCLSLLSPGWAPGVRSSRRASWAYSEIGHQPPFLLQTWSEPVFPPWDLKTVPSACTVDHSRATGQPVMVPRRSAVDPALWAALS

SEQ ID NO: 35331 - protein, 41 aa, Homo sapiens
LQAVSAPTLLACEHLCLRMGFWVGVLVFLCSFKLSPTNRKL

SEQ ID NO: 35332 - protein, 77 aa, Homo sapiens
LSGRWNGPCPLQPGPAGTTFMKSPANLFLTSVCHLSPKKAEGVGLFWGYCAKLMIWLDFYTWPNVLAPDMTFGLGAL

SEQ ID NO: 35333 - protein, 110 aa, Homo sapiens
LPPLGPERGEPATAALLRRPPPSPPGAAGLQLALEGGQARGRGAEPRRGAGRGALMDLAACASACVLPAAAAAPGPCRVRTNPERFRGDRLERPPRGLASPPSSQRLGTR

SEQ ID NO: 35334 - protein, 92 aa, Homo sapiens
LWCLWYHPTVWTGGLLRAPFLESLTRLRNIRLRITGNGSFAAQKQSLSPSSHILMAKQVEEKRKHDCRSDQFSLWIIFSVKCMDLSFPCSYI

SEQ ID NO: 35335 - protein, 36 aa, Homo sapiens
LERRAPLAPSASSPGAAATRAGFLLPCLPAVPLGTF

SEQ ID NO: 35336 - protein, 165 aa, Homo sapiens
MGMCFAAESDVQMFIAFLLCIFLICAALAAQEMENCHGNILMVISSGNLPTEKQDILTTALTMILHQADRLEVCPAFLGPEVTGELLWIPSKHQEPLCKLSSITNTSMDKCVFPMERPILMASPGTQTSGHLALWSVCYVLVMSPSKSVRKSTAPIDTPASILKK

SEQ ID NO: 35337 - protein, 44 aa, Homo sapiens
LPPVGGLAALGGTLLPRAEAAGPPGRGPPSRSPAHPSPDSSLQR

SEQ ID NO: 35338 - protein, 98 aa, Homo sapiens
MTSRCLAGAAGPPGHRPPSQAAKVEAAPVTWRRCTSPGWKTPRVSTSPGTASSGKPARKPFLALLSHGPLLLSMRAGLQSQVGPRPANWWRTTWLCSP

SEQ ID NO: 35339 - protein, 46 aa, Homo sapiens
VGGAPGQTLPPVLYIATSLWRGHLGSPPLVLLPVCVLVLRMRTVCL

SEQ ID NO: 35340 - protein, 108 aa, Homo sapiens
LTRSIQPGAHMCLRGLCLVFAEAFLMEHPLASQAMASPDPLAAPVLPVMIGWGTCGLTRTSDPGASTKDTAGSGPHGAGEGHVQYLEGFLEGSRKAGEFPMYSIYVSF

SEQ ID NO: 35341 - protein, 88 aa, Homo sapiens
LMTRPPPPPCNRSPGPLNADTDDPRRGRWARGAQATGRGLSGPLLPPASAASAVMTLGGAAAISSVPWTLPEFVKGPRKKRLFHPSPQ

SEQ ID NO: 35342 - protein, 81 aa, Homo sapiens [sequence omitted]

SEQ ID NO: 35343 - protein, 63 aa, Homo sapiens
LSPVGSAQDHPLLRRLLAQRLPALAPAARSPALLPPLAALLLPLLSPVLHALSPQPLPGGGYM

SEQ ID NO: 35344 - protein, 82 aa, Homo sapiens
VGSAQDHPLLRRLLAQRLPALAPAARSPALLPPLAALLLPLLSPVLHALSPQPLPGGGAADWSCSYLAILEGTHLISPNGYM

SEQ ID NO: 35345 - protein, 36 aa, Homo sapiens
LGLGLASLLLSLQTAYHETSSCDRTHSKNLLCFKIV

SEQ ID NO: 35346 - protein, 149 aa, Homo sapiens [sequence omitted]

SEQ ID NO: 35347 - protein, 62 aa, Homo sapiens
LCLLFCLLLMARMGSCFVVQAGLVLLESRNPSTSASESSGITGIIHPAWPRIFNALLRQLFL

SEQ ID NO: 35348 - protein, 168 aa, Homo sapiens
LSCFSFSFLFFFFFFLRRILTLWPRLECSGAISTHCNPRLLGSSDSPAPASQVAGRTGVSCRTQPVSLFPLFFFLISFLGCLSAFLSACFASTFSCVLGSPETSFSPCLHPPPKVLSSHPHPLQPSMPQPPKGPHCQSMPAHPRCALVSVYVCVCVCVCVCVWGVGGG

SEQ ID NO: 35349 - protein, 41 aa, Homo sapiens
MAMVTWVAALLPGNCHCLLFCPFAPFVELFCQTPLRQITRY

SEQ ID NO: 35350 - protein, 22 aa, Homo sapiens
LERTLPVFQATFMSLLLRFSVL

SEQ ID NO: 35351 - protein, 13 aa, Homo sapiens
MKLKNHLLLCLWI

SEQ ID NO: 35352 - protein, 16 aa, Homo sapiens
LFPVRLYIVLLSPCGL

SEQ ID NO: 35353 - protein, 36 aa, Homo sapiens
LSLQSLACQKQKKFVIFRVQMLCLLSQKIVLLGREM

SEQ ID NO: 35354 - protein, 34 aa, Homo sapiens
MAQAIICGALSVVCPAGRAGVTSARNPDGPDRPR

SEQ ID NO: 35355 - protein, 345 aa, Homo sapiens
LAAGTAAGAAPGLRGARGLPLAAAAAAAANVPAARRAPGRPRLAGGASLPRDLRAPAALAPAGLRVLRGRRGLRRACYGPGRRLRPPTLRLVAAPAAGPRGCSALVGEPRSSPCAQRAAPRQGAEPEDEPAAGAAVRGLRAALLCRPAGGRVVVRARGRLGGRGPVGGAARGGDGQQRSQSLRLPLLPGGRLPAPATAAEAAGLSVLRAAGRRGGRGGAPGPPGALPPTLAPPSLSPCSAGTAGRGRLAPTPSAPQTPALLLRKCLLGAWWSETGHLSLRRNLQGTRGLPGSVQITRGRRVCERVTLKLSPSSTLLFPSHVYISLCSSSFSSSLQFLSYLPIWRQ

SEQ ID NO: 35356 - protein, 35 aa, Homo sapiens
MDTCPLCLSAGFCAAGSGHSTRPADSSCRLHHPLH

SEQ ID NO: 35357 - protein, 44 aa, Homo sapiens
LPHFFLPGILHPSLLLLSCTGEQTCILDENKPTLETATQDIQKR

SEQ ID NO: 35358 - protein, 81 aa, Homo sapiens
LRIITVSRFSPSSPRASFLSLVTGSQFWSDSASTYPSVASPLPSFHLTWWPFLGIPWVSPARRASTRHQGARPLPLPCHRI

SEQ ID NO: 35359 - protein, 100 aa, Homo sapiens
LCASGVCAWSFSAWICLFIALLVETPKPVHPAKTPRAACGSRTLHPFPGCPLQAREAIRACWLRPPLSQAWLSPLRGRSPATPRGAGIPGMQAHSAGLHP

SEQ ID NO: 35360 - protein, 97 aa, Homo sapiens
MWWPAGRPAPTAPPEKVSQGPTLMPESLSCQFPQLLLCLLFSASARFTVQAAKSQGLGLRVVRGGKWVAGRKEHQGGWGQASDEERDRGGMGTGCAS

SEQ ID NO: 35361 - protein, 34 aa, Homo sapiens
LRKKLKLTVDILCLSSAANRAVSRAATMMILAGS

SEQ ID NO: 35362 - protein, 62 aa, Homo sapiens
LPCSPCCISRQFLGRCSCRCHQSRRGIALLIHPAALSFPFPPIPSHFLLPFPASFASISPTP

SEQ ID NO: 35363 - protein, 89 aa, Homo sapiens
MQMRSVWPGTKRQTRRRRRWCPEGARCPSAAASAATRVSGWCTEPRAPSPTGARAAGPRPRGPACCPSTRPSAAPWRRISRPTQSCWRR

SEQ ID NO: 35364 - protein, 224 aa, Homo sapiens
LRRWSGEPGFSPPAPSFSSLFSFPLLSLRPPAAAPQERGRFPGCSPLLSLVCPLVFPRSAEGTGWRLGSVRGRGQERGLRACRRCPASRSAGAAGQPGPALRPSAVSRGRPGWGRVTLRPAPAWWGLRGAGPPRAQGVPRRCGSSVPLFAESWASKECSAGPRGGQQVPLAPPGLLWWEPTRTVASLRLQATLEHRRGGRSGLEGFTPQQSSEPNPGLRDPPGA

SEQ ID NO: 35365 - protein, 52 aa, Homo sapiens
MFYIYHSEKVLFFNNILLTLFCLPLACLRNVFGFDYTLSFCNKFDSLKTFFF

SEQ ID NO: 35366 - protein, 9 aa, Homo sapiens
LLGFSVMMV

SEQ ID NO: 35367 - protein, 221 aa, Homo sapiens
MMMRVGRHVYISQRQRASAILFMSWQESLSVTCRLWMWMTGHLCTGLQLQGRPNVSSHCWSWEWTATCGTSMRARPWPMPCTAVTRRVSNSSPKRAEQSLLDPLPPRAVGPRRRRDGSTCSTKYSAKTRKKSREPIRRIPAGTDTERRTPQKSMTSSPPLIASWVPTAKNSLVIRWLWLNLRRKPQTIQNISYQKRNRWPVRGFHQSERRVSHPSPWAITS

SEQ ID NO: 35368 - protein, 43 aa, Homo sapiens
LRALCPGHLAALHLPATSPPRPWAQEFCCSCWWPQLGMVRESQ

SEQ ID NO: 35369 - protein, 100 aa, Homo sapiens
LKPSPPPGQKKKKKKTGHILDLLGAWSPVVGIVVTLGAEKKQPGALIRGLSRRVPGWHPMAQPLPFAWTLPHARSPSPWSLRSSSSSPLLAMWSSVWPWA

SEQ ID NO: 35370 - protein, 51 aa, Homo sapiens
VVFFFLFFFFFLIRGYGVLLCLPGWSAVTQSQLTVTSASWVQETLLPQPPW

SEQ ID NO: 35371 - protein, 59 aa, Homo sapiens
LESFFLDSILLINTATSSLLLSLQMLQHNQKFPLFFPSCIFSRFPCVRSPGGKLKVFSR

SEQ ID NO: 35372 - protein, 34 aa, Homo sapiens
LIFKLLFYDLFLMIEPELVETTLIISRSLQETGA

SEQ ID NO: 35373 - protein, 48 aa, Homo sapiens
LGVCCVYVIHNVYCTDVWGLCFMIHYSQIICWFMDILPFHFFSFPVFR

SEQ ID NO: 35374 - protein, 347 aa, Homo sapiens
MTAVWTATARPGPPRAPPPCSAACCCWGWPPAWAAEPRPEDAPRTRRPGVPGSRGGAGVRGRAVRRVRPEVLPGATQQGPPPGPRSRPHCPPPAAGAPWDSGPRACDLVSFFFCIIRRPVPFLSFSLSLFFFFFLAVSQRVGRNAARPTPRPASHHTYTHGTVADTPWPVPGSRAAADPDLQLPTIPVADLVLFSILYFSCNPPDPRPHRRPGDHGTHRLGEEERRKGWGAWKLRSVENYFCLYSLSPARGTGREHWSPRGPMVENPRSKEFAHCCLHGLFSFCVGDGGQVWGLQRNPQHSLKETVSLLGPPFPWAFLWIPAGSAPSPQAWLAEFSTPRPGCRCPTC

SEQ ID NO: 35375 - protein, 66 aa, Homo sapiens
LGLCSISLLLPVLWSRGTTASCPGIATRVSWTGSMGAWTPVLQAMGAPTVLPSSLGSSGCWKVWWS

SEQ ID NO: 35376 - protein, 11 aa, Homo sapiens
LCFLFGSIGVL

SEQ ID NO: 35377 - protein, 37 aa, Homo sapiens
MKWLSTDLFSKVAMICMTAASPRESSRRGLPNRCCGI

SEQ ID NO: 35378 - protein, 47 aa, Homo sapiens [sequence omitted]

SEQ ID NO: 35379 - protein, 69 aa, Homo sapiens
LAAVALASGGLGLCGASSVLQKGSSSSRPGRGCRRPGRSRGGLQPGLAPRGTGPAARRAHLSHSRLAAL

SEQ ID NO: 35380 - protein, 223 aa, Homo sapiens [sequence omitted]

SEQ ID NO: 35381 - protein, 62 aa, Homo sapiens
LQQLPQLRGRPDGMHAGQAAGQVLSGPAGAATALAALGLLPAEASPAHPQVPPAAPGNCQAF

SEQ ID NO: 35382 - protein, 88 aa, Homo sapiens
LKSLSTLTLVHLTGTLTSISKTWSLRTPCLQRLLISSRVLGIQGRGQPGWTGSWEGVSWQPPGQTDLPACQRQPVLPAPTRTSSQARC

SEQ ID NO: 35383 - protein, 44 aa, Homo sapiens
LLPSARPAALLFAVGAAPGAGPRAEPRRLQRRGPARRPGNFAES

SEQ ID NO: 35384 - protein, 29 aa, Homo sapiens
LKFYRHLEIKSLSLSVPMLSMILNYRQLP

SEQ ID NO: 35385 - protein, 25 aa, Homo sapiens
VVTFWLFARLLLCGVFHPRYGGHRG

SEQ ID NO: 35386 - protein, 37 aa, Homo sapiens
MGRAGKQKRIRVLFTLWRVSPRTVAWASPSSFVLCFL

SEQ ID NO: 35387 - protein, 76 aa, Homo sapiens
LLSALLCFSKAFQQQHEVGSLPPPVILIIFSLEVQELQAAGDRLLGTCVELCTGDWDCNPGDHCVSNGCGHECVAG

SEQ ID NO: 35388 - protein, 74 aa, Homo sapiens
LGKGACAGSCVLLVLRIFSKLKAESQGPCVLPWYLLTFRECFPLPSTGTQRLDLLRTSEKDCPYHPHHSKTLEP

SEQ ID NO: 35389 - protein, 48 aa, Homo sapiens
LGKGACAGSCVLLVLRIFSKLKAESQGPCVLPWYLLTFRECFPLPSTG

SEQ ID NO: 35390 - protein, 49 aa, Homo sapiens
LGKGACAGSCVLLVLRIFSKLKAESQGPCVLPWYLLTFRECFPLPSTGS

SEQ ID NO: 35391 - protein, 78 aa, Homo sapiens
MLQTLPAPSSMLCLCSASLMQRRKSGYPLRMMSTLNTPSILWRSTRTLKLLGIVMTPVPCHWMRAPALPTPCAGTIGL

SEQ ID NO: 35392 - protein, 52 aa, Homo sapiens
MRTMLLVYVMRRFVITIQYYFFVHQRNGVRSWQISLLESFIIYIIKLRVKDW

SEQ ID NO: 35393 - protein, 53 aa, Homo sapiens
LYGWWFLVLWGQVPPAIVQAAVCKPKKHEDTGRLLGDSPAPPHPGAAALRQPD

SEQ ID NO: 35394 - protein, 77 aa, Homo sapiens
LLLGLALPALAASLGCYPALSPDLLSGNLSAIHIDRLDCAVFPVCLSKRSPSKTIPGLPRHCHVHCKSSCDSSCRCL

SEQ ID NO: 35395 - protein, 30 aa, Homo sapiens
LHISTVALMSMLTASMLDRQSFYCWIVQDI

SEQ ID NO: 35396 - protein, 16 aa, Homo sapiens
LELRAKTFLTFLLLNI

SEQ ID NO: 35397 - protein, 57 aa, Homo sapiens
MTGGRSSAGRWTRECENLAALGPFRRGHEAKPSAVAKDKCAFFWAPSAVQPVITPRL

SEQ ID NO: 35398 - protein, 18 aa, Homo sapiens
LVHISLGLRLLFVLGQCD

SEQ ID NO: 35399 - protein, 16 aa, Homo sapiens
LRRKGWLWICCLLRSL

SEQ ID NO: 35400 - protein, 41 aa, Homo sapiens
LSGAVSTGPASGIVLWLPHENPICQFQKQKQKKFGYSGSHL

SEQ ID NO: 35401 - protein, 48 aa, Homo sapiens
LRPLSESMSTVKKMRGLLRSRLLSSLLLKAPLRLVSLFWRLCIRKLKI

SEQ ID NO: 35402 - protein, 28 aa, Homo sapiens
MKASTVAAAPLLPVYGEQVSRGRELRRS

SEQ ID NO: 35403 - protein, 50 aa, Homo sapiens
VAAATAVVTAATAAAGSHLSPVHPHLAAPPSSQQSPGRPAHARTAEPSAQ

SEQ ID NO: 35404 - protein, 128 aa, Homo sapiens
LPLAHTHGRLAAKFRLRSPLRDPAAVLGAVTLNFPSAVTHSPRSPSRPPARPPAPSRAPLPAFFEKAFYHQPPPQSNPHRTFAHPLHPNNNNNCKIENKSPNPGEKQPTPAAAAASASTASALGLQEG

SEQ ID NO: 35405 - protein, 27 aa, Homo sapiens
MSFLIAGFGLFIIMFINTFDSTVRNVG

SEQ ID NO: 35406 - protein, 12 aa, Homo sapiens
LVFFSFLAFFFF

SEQ ID NO: 35407 - protein, 54 aa, Homo sapiens
IHVFYSKVLNMGVSFFYSLSLMTQQKRNCRPWDNQHLNKLYNYFFKLSYRVIRL

SEQ ID NO: 35408 - protein, 74 aa, Homo sapiens
MALKTALSLCMPLSSSSCHHRLILRWIPASSTTMCSEHVEEKKQLYLLVSFCLSSWTLTFSETQQSLQWSVGPP

SEQ ID NO: 35409 - protein, 49 aa, Homo sapiens
LHPQQQCAVSMWKKRSSFTYLFLFVSLPGHSLFQRLNSLCNGVWVHLSL

SEQ ID NO: 35410 - protein, 46 aa, Homo sapiens
IDENGKFPGFPSAQLSCLPLLGPAAHSLLSSVFCAWTLWAHPGHGG

SEQ ID NO: 35411 - protein, 52 aa, Homo sapiens
LSLEASSEDLVGLSFWVWAISVLMCVLFYHYCIMVFKPVGTQRTSLCNNNEE

SEQ ID NO: 35412 - protein, 26 aa, Homo sapiens
LAFALGWCWKLLVVARSLLHCKGVRI

SEQ ID NO: 35413 - protein, 37 aa, Homo sapiens
VSSSALFLLYFIHNSQRCWTRMGRPPVAMSPPRCSWG

SEQ ID NO: 35414 - protein, 40 aa, Homo sapiens
KHCQKTLSMGLCWMRVLLTQVYTSISGQQKRRMTQAWCIK

SEQ ID NO: 35415 - protein, 43 aa, Homo sapiens
RAAAPAPPRPARTIAAAGRVGARGGLLGTGLAHPSHLPAPWDR

SEQ ID NO: 35416 - protein, 38 aa, Homo sapiens
ILPVTEHMRMQQLLGVTGFLWVLCEEYAFIPVSGRGEE

SEQ ID NO: 35417 - protein, 37 aa, Homo sapiens
KELVLGAPWFRRQPPASSSFCCCSWGLCLLPTPALCP

SEQ ID NO: 35418 - protein, 18 aa, Homo sapiens
MATGWAWLETLALGLCLL

SEQ ID NO: 35419 - protein, 41 aa, Homo sapiens
LAPSRDALSFFLLFLLLPLFASPANAVGAARRSGAARDRAT

SEQ ID NO: 35420 - protein, 59 aa, Homo sapiens
KSIFSGRVPGSSSSFLLFLLLLHLRLLGDHCPLSAADTGCSSRLGLFTYAPHRSLGRPT

SEQ ID NO: 35421 - protein, 15 aa, Homo sapiens
LAGVAGGVRGPSPMA

SEQ ID NO: 35422 - protein, 51 aa, Homo sapiens
KRRQALQNWAKIPILISNSSLPPSVRLMALLAGWIIELSGGTDAAAIPNKS

SEQ ID NO: 35423 - protein, 39 aa, Homo sapiens
VCMEGLAWVSMEGLAWVCMEGLAWVSMEGLAWVCTEGLV

SEQ ID NO: 35424 - protein, 52 aa, Homo sapiens
KDTSPMEMVCRNGRMAGVNCGETRLRHPPLKRGMGTGQERGTGMCGEDTFIQ

SEQ ID NO: 35425 - protein, 50 aa, Homo sapiens
MCQWGSLSPGPKKQGTKFKTLASSQPLKPWPPEFPFLSLSFYFFYFYFYF

SEQ ID NO: 35426 - protein, 72 aa, Homo sapiens
LLLLVLAWLQPWLGKRCHPPTWARAGSAPAAGTLSWLSRRFGQELQQALLGPAGVQPGPCLVPQLSRAAAAG

SEQ ID NO: 35427 - protein, 38 aa, Homo sapiens
RPHQRTNADNSSWSFALKTRSWGHSEGDMRSRRCCFVR

SEQ ID NO: 35428 - protein, 87 aa, Homo sapiens
LGFFDFSFKKKKVFQAARASCARPSPGPAPPAASGRERIAEPRAARRASAGNQGDAPGTADNLSAFQEQPTRDLTCHLGSPTQWRWL

SEQ ID NO: 35429 - protein, 33 aa, Homo sapiens
MHVSHTLATLAASALQSPSPRPLVGSLVHTGGK

SEQ ID NO: 35430 - protein, 71 aa, Homo sapiens [sequence omitted]

SEQ ID NO: 35431 - protein, 8 aa, Homo sapiens
MELKGKRK

SEQ ID NO: 35432 - protein, 175 aa, Homo sapiens
MSAGQRRAGNPEPTLETSSIPQSTGAAHPAERTSLPTTEALPPPARPPVTGGQSNVTSRDPDWEAPFDQCACALGLCPPQEERSRELRRWWLGHQREAGVAQAAGAGTDLERRKRGRKVVLSGWGLPGIRRPAVEPQGSTGQICLPCCLSYAESLAQGGGFSYWPRYLNGMEDRS

SEQ ID NO: 35433 - protein, 34 aa, Homo sapiens
MLDNRQKVETQRTCDMTDIRSFSWPQMSNNILPE

SEQ ID NO: 35434 - protein, 28 aa, Homo sapiens
MYLQVTLHSSLAALDLVSSFVEWRHHTF

SEQ ID NO: 35435 - protein, 257 aa, Homo sapiens [sequence omitted]

SEQ ID NO: 35436 - protein, 140 aa, Homo sapiens
MVLLVLLVLLASLVPEAPLDPRAPAALLVPRVTAVNLVLLAAKETLVLRESLALLVFKDPLALLERKESEELEVNPDPLACPDPLASVVDLVAVVSLAQMVLLVPRVPLVNVVLLALLAPKDLLVKLVVPVKLVCLVPRV

SEQ ID NO: 35437 - protein, 71 aa, Homo sapiens
MRSSTSCSSWTPASPPTTRSWVTSTTIMAAAAAVGAAGPQPQPQPLRAPVRSCCGSWSSGCRSPAPCAWPG

SEQ ID NO: 35438 - protein, 166 aa, Homo sapiens
MLPTTRAAWKMAVCLVAGKTPCPSTLSLRGGSVRHAGIASLSCFTCMMTMAISLTALCAARAESCCFAATRAAAGVSVWSAWRCWWAQAQRPRPSFRSPGAVTCVSRSAVMASCGAGRTGTCACRPSSPVTRGLNMKPPSCTLPFPQPEGGPFESCHCLMASRQAT

SEQ ID NO: 35439 - protein, 46 aa, Homo sapiens
MLTLSLQPWSPLSLAVLPACLETFNLYPSPLSPEASSSGVWLPLGG

SEQ ID NO: 35440 - protein, 61 aa, Homo sapiens
MGTSCPEERIFKEKGSSTSSTQPRNRGRTSQARSGAPVCVPARDKRERHNWLQPFSCLFLL

SEQ ID NO: 35441 - protein, 67 aa, Homo sapiens
MWPSGPWPLLSVFPLPSWARHRSRMKRSSAWWRSLPLRITGARCLPSASSSSPSSSPCSSSLSATAS

SEQ ID NO: 35442 - protein, 45 aa, Homo sapiens
MTLLLLLKSPYLAFLKFQGSLCATYHSPLTLVPSGPIVDGCMGAM

SEQ ID NO: 35443 - protein, 79 aa, Homo sapiens
MSRPAAAAAAAAAALSFVSRAVWARAGVPGTPPPPSFPQDSSLLALGPNGARLPGGRSAHRARLPLLLPDHLVSTRNEI

SEQ ID NO: 35444 - protein, 27 aa, Homo sapiens
MVTPSWRGWPKPRSLAWWGRGLSHSLA

SEQ ID NO: 35445 - protein, 38 aa, Homo sapiens
MAALILDLQNHEICGYGHDLDFGDGFTVTHAFKISGSK

SEQ ID NO: 35446 - protein, 38 aa, Homo sapiens
MELASWKSGKGKANMSAFGLRGQKGWEIRPRRNLLTHR

SEQ ID NO: 35447 - protein, 51 aa, Homo sapiens
RKCVGCAGPQMDDIWPVVVMITWSMCGLVLLERVAGFLCRHSPSIKGLSRP

SEQ ID NO: 35448 - protein, 70 aa, Homo sapiens
KPTGAGPPLTRRLRLPPPGLWAQRAQMPGRTPPPAAGTPIAALEPLGRRNWGLHRHLLLPSPRSLPHLLI

SEQ ID NO: 35449 - protein, 62 aa, Homo sapiens
LKDQEIKQWCKSGKNSAFSSTSGRASTVLSQRLSLLPAARLSARRPRLVGWETAVAKGAGNL

SEQ ID NO: 35450 - protein, 51 aa, Homo sapiens
LGVPLGLVWGRSASLVVLAVTGSSSSKDKGPDSRSSTLATPLLPLLAPDGQ

SEQ ID NO: 35451 - protein, 49 aa, Homo sapiens
VPASVTRGGLQGRTATALKENLLGTRAAVGSEGYRLMCVLNSGGGSDGR

SEQ ID NO: 35452 - protein, 15 aa, Homo sapiens
LVSASGVHTWGSNLG

SEQ ID NO: 35453 - protein, 53 aa, Homo sapiens
KFEINSKLPATLSLPLMCTPCKQAAAEHSRDALECENAKPQTENIQMLGSPYR

SEQ ID NO: 35454 - protein, 29 aa, Homo sapiens
IAFYDFFCACIHFLFRFVLFKAVAAATAA

SEQ ID NO: 35455 - protein, 35 aa, Homo sapiens [sequence omitted]

SEQ ID NO: 35456 - protein, 70 aa, Homo sapiens
LMVLGSALQLPSAKAQAGRCAAALLRAALSPSVAGWFFGGKLYPILVTPGNSLFVCYLMVSRLPCLVEPC

SEQ ID NO: 35457 - protein, 62 aa, Homo sapiens
IYRPARKEKKIPDVWSKQEFPGGLGNVWLFLSLLISVVTTGGPQKTHRNERPEVYKSLLEIF

SEQ ID NO: 35458 - protein, 14 aa, Homo sapiens
IWDLGLLIFLTVVS

SEQ ID NO: 35459 - protein, 11 aa, Homo sapiens
MKMLLAFAVST

SEQ ID NO: 35460 - protein, 16 aa, Homo sapiens
MNFYITVHVLCFAVIP

SEQ ID NO: 35461 - protein, 11 aa, Homo sapiens
MKCGVCWVGAD

SEQ ID NO: 35462 - protein, 49 aa, Homo sapiens
IPIQGSIGSSNKSGKTYYKFVAVIQLLIFSRGLTPLDSGWSWEDVNPVP

SEQ ID NO: 35463 - protein, 12 aa, Homo sapiens
VGPISLFSALLA

SEQ ID NO: 35464 - protein, 9 aa, Homo sapiens
MCLSLVMML

SEQ ID NO: 35465 - protein, 36 aa, Homo sapiens
LGVASSCQIPCSPGDPEKHRAIPDPGTFRRLAAIWE

SEQ ID NO: 35466 - protein, 97 aa, Homo sapiens
ISTSLHFSFLWGAALVLFGPCLLGMEQSIEQTTEILLCLSPVEVASLKEGINFFRNKSTGKDYVLYKNKSRLRACKNMCKHQGGLFIKDIEDLAGSC

SEQ ID NO: 35467 - protein, 23 aa, Homo sapiens
MVSIHILLLPALLKSCSHLSASQ

SEQ ID NO: 35468 - protein, 33 aa, Homo sapiens
MRRIHLGLAFALGWCWKLLVVARSLLHCKGVRI

SEQ ID NO: 35469 - protein, 40 aa, Homo sapiens
MLYQQIVVFLLLTLVYFCLIYISLLSNFSCTSSSNFKNIT

SEQ ID NO: 35470 - protein, 25 aa, Homo sapiens
LLLACEDPLWDMDQKCCSSRYLPPV

SEQ ID NO: 35471 - protein, 72 aa, Homo sapiens
IGVMGQIYTRTKNLPCKFIIECARAVWSWIQPPWLASLSLMSLPLCSLLWESSALLDMRLEGCLGLPTHKLC

SEQ ID NO: 35472 - protein, 19 aa, Homo sapiens
ILRMILIFVRVRIMTKTSL

SEQ ID NO: 35473 - protein, 53 aa, Homo sapiens
ILSSCWMSFTQKINSTWFLNFCTKISRNSWMPLLSLAFLFPSSRAICSSCSRA

SEQ ID NO: 35474 - protein, 20 aa, Homo sapiens
VLSLTFVYVVMKHSTVLCEV

SEQ ID NO: 35475 - protein, 47 aa, Homo sapiens
MQIQGFRFCLGFPFLSFLFFFFLQGVRRELGVSTSLPFGSCGKSPCS

SEQ ID NO: 35476 - protein, 26 aa, Homo sapiens
MLHFFHDSGWFFLYLECFSSVVPLPL

SEQ ID NO: 35477 - protein, 42 aa, Homo sapiens
MPVLHLSLQFHCVSLLLGILKSGTKLLHDPCTFASAYIIALL

SEQ ID NO: 35478 - protein, 53 aa, Homo sapiens
MNTVFPSTSTPWPPPSSRRCFRQIPLPAQPLTSCLMTSSLLLAISLPVSPSPA

SEQ ID NO: 35479 - protein, 10 aa, Homo sapiens
IMPNKRFYTF

SEQ ID NO: 35480 - protein, 73 aa, Homo sapiens
MGRLRPWLCVPLRVGAGLGPNSTAAGFSLISEPRRWQSGRPGQVNPRAAGAQAPTPAQRGRKGPPPAQRAQRP

SEQ ID NO: 35481 - protein, 26 aa, Homo sapiens
MKNCGTDLRCSLVGNWHANHNHDGGF

SEQ ID NO: 35482 - protein, 41 aa, Homo sapiens
LAAWFVQRVAVMALVSGLHGVHLESGARLCVQFGSVTKRCN

SEQ ID NO: 35483 - protein, 39 aa, Homo sapiens
MNPPERKNCQHSRTSEGTNWGHAAFKKHNRHREGPRLHS

SEQ ID NO: 35484 - protein, 82 aa, Homo sapiens
TPALSAPTFFLQPRPPPPLLAAAMESSTFALVPVFAHLSILQSLVPAAGAASPVAISAQHLCYSHVTPGDPGAGAGQGPAPS

SEQ ID NO: 35485 - protein, 67 aa, Homo sapiens
VGEQQAMRERRDLEVLDVPVDNLKEHGTWDMTAPSIPSGGRQSLSVRQHPAFMRTVCCLLTEPPVVY

SEQ ID NO: 35486 - protein, 7 aa, Homo sapiens
MKTLRPP

SEQ ID NO: 35487 - protein, 23 aa, Homo sapiens
ISLSSTAMFLLLSCCKATHLRFP

SEQ ID NO: 35488 - protein, 96 aa, Homo sapiens
TRMQTQAEALTAGMAGVATAAAGAWTQPQLRPVELPQRTRQVRAETPRLRPGGHECGRTYSPSACLSRPPWRRKSPMGPWHQMPSPTKGWLGRISQ

SEQ ID NO: 35489 - protein, 28 aa, Homo sapiens
KVLHMIRKQLWKMTAFISLNILPYGTDQ

SEQ ID NO: 35490 - protein, 16 aa, Homo sapiens
IHKILVCIFLNTVHVP

SEQ ID NO: 35491 - protein, 46 aa, Homo sapiens
TPNFECFFVTHPHMSQLERILGWSYCMLIVLFFLLAVHFGGYYKEI

SEQ ID NO: 35492 - protein, 41 aa, Homo sapiens
LLIFFSWCVWWLFLSVEGKRRYHPRLSPTPLQNGFSDTPAV

SEQ ID NO: 35493 - protein, 9 aa, Homo sapiens
MVNLLFFLS

SEQ ID NO: 35494 - protein, 68 aa, Homo sapiens
MCVLAFLTTPLLCISFFHFLFQAFLFLPCGNSFGASDCSSSECAAIPVDPVPGACSKFSSVRPFAGLV

SEQ ID NO: 35495 - protein, 17 aa, Homo sapiens
LLFAFGLASFIFLIHRG

SEQ ID NO: 35496 - protein, 37 aa, Homo sapiens
MTLSLCWASPCCWEPPGPWPSFLLASSCCPSCSSSPS

SEQ ID NO: 35497 - protein, 39 aa, Homo sapiens
VCKALFVAERLELQQRYEQVSRGHRRKSSYSSGRLEKIL

SEQ ID NO: 35498 - protein, 53 aa, Homo sapiens
RVRNESVSKRQNPGLLTSQWGMLFTLQLTLGLPGALSLGCLMRDVQGFSWVGV

SEQ ID NO: 35499 - protein, 84 aa, Homo sapiens
RECSSDAVTWAGALGLASALVAARPALWSHGLPGRTPRLSPSRPQPPDDPLLPSLSPTVGLAEDGARPGPRGAAQVLGGREPGA

SEQ ID NO: 35500 - protein, 30 aa, Homo sapiens
ILGTNMLLFPLFLLLSLDLCQKEGYAESLI

SEQ ID NO: 35501 - protein, 81 aa, Homo sapiens
LVPSSSTPFSLGPMGTCTAWCEAATVSLSLRLPCSSARWPPPWRTVTSTVWSCVISSCVALSSLTVRGRSWCWRTWRTPAC

SEQ ID NO: 35502 - protein, 83 aa, Homo sapiens
KREQLGRGSPSSRSLERLKFTFQPLAPFAPLGLASEAVAVLGRRLGGAGCEQGLRATLLLATGFCCEVRPGNGGKKELREAVG

SEQ ID NO: 35503 - protein, 29 aa, Homo sapiens
VGQTRSTEDGAGRPGHQQDPRPGARGPED

SEQ ID NO: 35504 - protein, 9 aa, Homo sapiens
IFLFLILEM

SEQ ID NO: 35505 - protein, 75 aa, Homo sapiens
MRPIQQHTGRTAFTGQDPLHIGIFLIEIYRAQEYLHLEKSLGSSYPSTGCIPISGPSLAARQISLFNSKRILCKQ

SEQ ID NO: 35506 - protein, 30 aa, Homo sapiens
MKTMLCSSALVSMRSLKFMGTELAATPMPL

SEQ ID NO: 35507 - protein, 12 aa, Homo sapiens
VFLIAALLPLWM

SEQ ID NO: 35508 - protein, 23 aa, Homo sapiens
KRNFKARRSCLLVIMLLTRTETV

SEQ ID NO: 35509 - protein, 52 aa, Homo sapiens
LNCFIFPPATCKVPVYLHHHQHLLFSISLMIAILVDLKWYLIIVVLIAFSID

SEQ ID NO: 35510 - protein, 62 aa, Homo sapiens
LPPCRLTWPSPVNTPPEGLCFLFASNHIFSIEKSFLSPVHYESEVYFFFVFFFVPVYFKCIF

SEQ ID NO: 35511 - protein, 29 aa, Homo sapiens
LWFFSIVLYVPLLAVLLFNTVLYFFSKCT

SEQ ID NO: 35512 - protein, 50 aa, Homo sapiens
KDIGGGLALKLLFKTRKRRRKRKKRKMLGNIYLTCSTARTLASCCYSCKY

SEQ ID NO: 35513 - protein, 52 aa, Homo sapiens
TFYCSLFPRVTPRLVVSSSALFLLYFIHNSQRCWTRMGRPPVAMSPPRCSWG

SEQ ID NO: 35514 - protein, 11 aa, Homo sapiens
IIILSLAIVCP

SEQ ID NO: 35515 - protein, 80 aa, Homo sapiens
VHSTRVLNLRRFLRGAAWMLLSPTRCISCCHQESSLASQGLRKYHQSDSTVLCPLRGRRKRMPCRTAHSVPLCSRTPSIM

SEQ ID NO: 35516 - protein, 36 aa, Homo sapiens
RTHWMSSIVHSFLRLLQHPLRVSGAAELKEPKLGLK

SEQ ID NO: 35517 - protein, 49 aa, Homo sapiens
LLSLASSVLPFVSLLILFLGGGLFAFLSSWHNFHFILLSVYVNFPLSRL

SEQ ID NO: 35518 - protein, 44 aa, Homo sapiens [sequence omitted]

SEQ ID NO: 35519 - protein, 116 aa, Homo sapiens
MSGLTLSVLDFKSIVLGEEDKVSGLSNSPESQSQSRSWTQIVQSSCSYTLHFAILNKKTKTPGGLQLRPRCRDLPTATLLANDPVNSTSSSSTSRACVCMSSFWSFLSWYSLCFNF

SEQ ID NO: 35520 - protein, 50 aa, Homo sapiens
MPSQKLPLLNHQISLRTPSLSREPHEGNHPHDLITSHQVLPSTCGDYNSR

SEQ ID NO: 35521 - protein, 15 aa, Homo sapiens
MGLLLLRLTKQLMLL

SEQ ID NO: 35522 - protein, 130 aa, Homo sapiens
MSLCSLLSPRSGFRCCCAAPPPPAQPHQEAQGGLVELLMHAAARKTLFNFPPAPSRASPGHRVACQPDRARKSGSWAVAQRRREQEEAGARAGAVDPLGLPLVSSISCVQHCNLAAGVQTGRPPASSTDC

SEQ ID NO: 35523 - protein, 23 aa, Homo sapiens
LGNRRAHLSWVLSSSVLGLEVAD

SEQ ID NO: 35524 - protein, 38 aa, Homo sapiens
VGRKKFLFLSAVLKCISQPENISDFNFCRVCPRIQSSI

SEQ ID NO: 35525 - protein, 34 aa, Homo sapiens
MRNKREGAFPCAALGETHTDRGSGMTGKGGNGFC

SEQ ID NO: 35526 - protein, 89 aa, Homo sapiens
MNQSIVLKGKIPSDIKLHFPRTSNINHPDFNYGITGATAYLLSRGQEDLCDWDFMDLASPARCVSNSWEYCSMIIELVSIVCFLFVALS

SEQ ID NO: 35527 - protein, 28 aa, Homo sapiens
MFKYFYIKYFFKLFGLAIEQMFSLYCIF

SEQ ID NO: 35528 - protein, 65 aa, Homo sapiens
LLFALAMIGNFTYGLGVVLKAPAATCHKNTYFVHHLPWLIASFGILFLNSFVSFAIRLPLENKHV

SEQ ID NO: 35529 - protein, 94 aa, Homo sapiens
LPYIYIYIYIYIYIYICPVFDPGEQKKKVRKGKNYTHCPKKTEVGRICGERKKKTRPPNEIMKVQRLAVPDTVGAQSVLVPTIPLFLCSFLLVS

SEQ ID NO: 35530 - protein, 15 aa, Homo sapiens
VQERWGLLIILFCLF

SEQ ID NO: 35531 - protein, 33 aa, Homo sapiens
MVPDFSLLFSVSATTVLAQALHISHMNACRTVP

SEQ ID NO: 35532 - protein, 30 aa, Homo sapiens
VERLAFFFLLVQSFGYCERPRRSCGLAFCA

SEQ ID NO: 35533 - protein, 43 aa, Homo sapiens
MLNTLLLISGLKSICLPLPRLRAVSLKIVASTKSVSKIAPQLL

SEQ ID NO: 35534 - protein, 50 aa, Homo sapiens
LLSHRVSIKRKIMQSCKMLISFLLLSFLTASRLTGYSKPSGAYLLFFSTS

SEQ ID NO: 35535 - protein, 46 aa, Homo sapiens
LRRYRKGRSRCFLGSQSFTETLAIPFGMFTGTPVLSCLSYASSTPY

SEQ ID NO: 35536 - protein, 36 aa, Homo sapiens
LDSCTSRMVFVFFGGSLGFVCLLLFQSVESLQCRKA

SEQ ID NO: 35537 - protein, 30 aa, Homo sapiens
LLFARRSVAGTEATVGTSVIVSLLGPLFSD

SEQ ID NO: 35538 - protein, 48 aa, Homo sapiens
LLSLFQHFVAASLLCSVLLPVKGFSPHRGAKQYVWPDPVAWLSRLLSQ

SEQ ID NO: 35539 - protein, 84 aa, Homo sapiens
VAAAVCGVLLQTIDASVFAVPGGFTSESSETAKMAACPFLWEFHPRGVQNCCWPEYTCMRWLKTPVGLFMRMACAKRHPEISCC

SEQ ID NO: 35540 - protein, 25 aa, Homo sapiens
LIIFLIYLQGSVCQMCATLLISHQR

SEQ ID NO: 35541 - protein, 58 aa, Homo sapiens
LKPFLALCLSATSLGANGHELRLSKVSSTLGLRSPWQSPRCLRYHGRNDHPGSGRSHG

SEQ ID NO: 35542 - protein, 46 aa, Homo sapiens
LYKHMPIPYDGLELGMSVYGVAYRTTQVISISGFIFSVQTAWVLFF

SEQ ID NO: 35543 - protein, 11 aa, Homo sapiens
VVLLIAVFRNM

SEQ ID NO: 35544 - protein, 156 aa, Homo sapiens
MLARIVSISGPRDPPASASQSAGIIGVSHRAQPLSFLIWSFVLVAQAGMQWRDLSSLQPLPPGFKRFSWFSLLSSWDYRNAPPHLATFVFLVEMGFLHVHQASLTLPTSDDPPASASQSAGITGVSHRAWPKPSSLSFCGCCCEICRTSSCLDSIF

SEQ ID NO: 35545 - protein, 45 aa, Homo sapiens
LGNTGRPPSLQNILKISQVWWLVLVVPATWEAEVGGWLESRSSLH

SEQ ID NO: 35546 - protein, 83 aa, Homo sapiens
LDGVSGLLFRFLSPYSGFWIAFGIFRAIAGPPERVGCRVWARPPLAWRVFLVSVPAAPRSSLLCCSLFLWFRPTLCRPTAWAC

SEQ ID NO: 35547 - protein, 24 aa, Homo sapiens
MLKFHPIILVLLDVFRQQLLIQGR

SEQ ID NO: 35548 - protein, 55 aa, Homo sapiens
LSHSLKDSPHLGLLFFFFFLIIIIFFFFFTDLSDVCVQSAVGRLMGPESVVTDNL

SEQ ID NO: 35549 - protein, 12 aa, Homo sapiens
MQAWVFFLTISA

SEQ ID NO: 35550 - protein, 17 aa, Homo sapiens
LILLGVMFFFLSCLQLF

SEQ ID NO: 35551 - protein, 55 aa, Homo sapiens
LPACPPPGAACFQTLNWRLCWVSPFQHPAVVWLVPGGAGLLFFGDTLVGVGCLSP

SEQ ID NO: 35552 - protein, 206 aa, Homo sapiens
LDHAQDGRRSLSGRCREGSVQAPQRPPASCPGERPPGSLGPRRGQPGALMWGSLTVLGLAVGFRAAEGATKASVCPAPLALTEPRDRASNPILQIWKLRAENPSPESNCHRISWRPCLSQPPRGARPAAGGTRRGRSCGHVSSAAPPRCPARTPGWPPSTSGTASAPGAWSTPAGWCRPPTASPTAPPGTASPWCWASTSSTARRT

SEQ ID NO: 35553 - protein, 31 aa, Homo sapiens
LCNLHSSISYLFGHCYTLAALPLSWGMCTAA

SEQ ID NO: 35554 - protein, 19 aa, Homo sapiens
MMMMTTMTTIHLFWILSAN

SEQ ID NO: 35555 - protein, 83 aa, Homo sapiens
VFSLPACLPLCVCERVCVRLLCTGKNTAHVLCMDVTDTLFSLIFEKQARCPAHHMTPSILLLSAHFIGGIHHTWYSQSTESMR

SEQ ID NO: 35556 - protein, 32 aa, Homo sapiens
VPMRGLPEKSLTCLSVALSSLVFSVTPVCGTR

SEQ ID NO: 35557 - protein, 58 aa, Homo sapiens
LCPCRRVLRWRRAGIKPTTHPLKKIHLKLPPLPDRSSCIRSGAAPDMKCSRFLDIETL

SEQ ID NO: 35558 - protein, 20 aa, Homo sapiens
LKMARASLWRAGGTLTLTAL

SEQ ID NO: 35559 - protein, 37 aa, Homo sapiens
MSRVGVETGLLLAPAPGAGSDSRLSGWPEPEQSLGLE

SEQ ID NO: 35560 - protein, 26 aa, Homo sapiens
LLLLTLWVQTVFMSYNTHREGLQLHS

SEQ ID NO: 35561 - protein, 79 aa, Homo sapiens
LPHAESTEISGALEGIVSGREEAGDHTELRSREMMTLPIDQTKKYMFQSCVLLLCVSGIGGFLVSLTSRMKLRTLADRV

SEQ ID NO: 35562 - protein, 47 aa, Homo sapiens
LAVIQIAFATNLKTYRGRRTGIILFVSCFETSICKGFELIFIIHMRK

SEQ ID NO: 35563 - protein, 21 aa, Homo sapiens
MATFSVFVVCGVGVFMELPVS

SEQ ID NO: 35564 - protein, 40 aa, Homo sapiens
LFVTVIIIFVIISGLIEGNLRGLHLYILNRFDRFLNCFFS

SEQ ID NO: 35565 - protein, 32 aa, Homo sapiens
LHMVLLTFWKVSLSSSGRISISLSNSHLPFSP

SEQ ID NO: 35566 - protein, 17 aa, Homo sapiens
LLISFVTFGLLLLPHTH

SEQ ID NO: 35567 - protein, 35 aa, Homo sapiens
MLWRTEGFHRVQRTLTSRPLSLLGHVVVLLLRVCR

SEQ ID NO: 35568 - protein, 65 aa, Homo sapiens
LAWRRSSASLSLGVALADTPLLCSGFRAGHACGDRNPTPADLGLQEFVVYVCGGAAASVLSAGRQ

SEQ ID NO: 35569 - protein, 44 aa, Homo sapiens
MRPVVLLSVSLRRTEAHLPPCLLRPGLVTASAEEITTALELLVC

SEQ ID NO: 35570 - protein, 11 aa, Homo sapiens
VLALSWLLHVG

SEQ ID NO: 35571 - protein, 14 aa, Homo sapiens
LKQLGYVCLLYFLF

SEQ ID NO: 35572 - protein, 38 aa, Homo sapiens
MFGDGFPPLTLQALSFLAVSWSFQWQAAYFKWDLERIP

SEQ ID NO: 35573 - protein, 29 aa, Homo sapiens
MEKTRALSSWHHLSFLLIASFSSELHLAN

SEQ ID NO: 35574 - protein, 15 aa, Homo sapiens
LGVCMALHVCVFVSV

SEQ ID NO: 35575 - protein, 65 aa, Homo sapiens
LHALLFSWKALPEDLNALDSGQRPFKWITKSRLHQAERPLTSSVMLPFTMCLLGIRSVARHPSCF

SEQ ID NO: 35576 - protein, 24 aa, Homo sapiens
LQRMHTSGRGWGTTCLLVLLASDE

SEQ ID NO: 35577 - protein, 35 aa, Homo sapiens
MLLYPLFPILIFSPLLPFIRPRRRVGQWVRRKSIW

SEQ ID NO: 35578 - protein, 58 aa, Homo sapiens
VNFVSTLSRGKFGLSPGVHTAAATQCATYHFFLFCFVLFLKDHFILKRKADPSKHESI

SEQ ID NO: 35579 - protein, 51 aa, Homo sapiens [sequence omitted]

SEQ ID NO: 35580 - protein, 25 aa, Homo sapiens
LILQLRMFLSPMVHFDCLIFVIKFL

SEQ ID NO: 35581 - protein, 20 aa, Homo sapiens
MGKRVWLWMVISCWQVVKLI

SEQ ID NO: 35582 - protein, 59 aa, Homo sapiens
VRCKERNRGAIFVSQGRAPARTREDQLRMARSRKAKEETQAVLTKSLSNIGRKFQFRDV

SEQ ID NO: 35583 - protein, 44 aa, Homo sapiens
LVPKEDDSTSFSFLPSLPCPALLPLLAVVVCQHLAGDFLNLQGE

SEQ ID NO: 35584 - protein, 36 aa, Homo sapiens
IRRNEENESFKLQSRSVLFRHKIISLILSPFAFASR

SEQ ID NO: 35585 - protein, 68 aa, Homo sapiens
MTLLNWKLRLPLGHFGLLMPGSTGQGGSYSVGCMADLTTKGKLDYCSTMEILSGLFHGSGTTSSFPTS

SEQ ID NO: 35586 - protein, 56 aa, Homo sapiens
KDKCVCLKMASFGLAWWLTSIIPALWEAESKCTVLVKSAVAYSNVQGFHIHSPLAH

SEQ ID NO: 35587 - protein, 35 aa, Homo sapiens
MLQRASEVSRKERPSDSKQLCNWSLLRMTPSAWDP

SEQ ID NO: 35588 - protein, 12 aa, Homo sapiens
MQGIFGSLTDLT

SEQ ID NO: 35589 - protein, 9 aa, Homo sapiens
MKTYFMFLI

SEQ ID NO: 35590 - protein, 10 aa, Homo sapiens
KRFLKCLWFL

SEQ ID NO: 35591 - protein, 29 aa, Homo sapiens
LNIKRVIVELPVICIFFSFLILTLFKKCR

SEQ ID NO: 35592 - protein, 54 aa, Homo sapiens [sequence omitted]

SEQ ID NO: 35593 - protein, 41 aa, Homo sapiens
LQPLSMTPSGFGWLWGRGPRGGLALSVVAASSLATMANAEI

SEQ ID NO: 35594 - protein, 33 aa, Homo sapiens
LQALGCSAGVLLCLPGWCAVVRPRLTAASATQM

SEQ ID NO: 35595 - protein, 29 aa, Homo sapiens
LQLSFLWGIIHLSLSVMPFLTCHLTFSLP

SEQ ID NO: 35596 - protein, 41 aa, Homo sapiens
IIVPQFPPRQMGLQRLATHIDGAYVQAPVHRKEQNRHSSWS

SEQ ID NO: 35597 - protein, 39 aa, Homo sapiens
LAKNSPHQCRLPIRKWWLVWLMPWPTSITKLAFLLSNFY

SEQ ID NO: 35598 - protein, 8 aa, Homo sapiens
LGFLLVAA

SEQ ID NO: 35599 - protein, 33 aa, Homo sapiens
LVTLPTLTFVPVSSLLLGLQLIETGIQRSLGGL

SEQ ID NO: 35600 - protein, 34 aa, Homo sapiens
IWKAWAVLGLGTGGYGLIDDSEGEKTPWVPSQKE

SEQ ID NO: 35601 - protein, 40 aa, Homo sapiens
RAANGSQFAIQVLIALVEGGLNQIFFFLKERDFFRSLAPC

SEQ ID NO: 35602 - protein, 55 aa, Homo sapiens
LCAPRSPRTPLAAGCPAWLAPCCPRAAPACSRPTCCWCWCSCPLLAATAPQAPGF

SEQ ID NO: 35603 - protein, 22 aa, Homo sapiens
VLANTSVITIIAMIIVLITLTR

SEQ ID NO: 35604 - protein, 37 aa, Homo sapiens
LRTHWMSSIVHSFLRLLQHPLRVSGAAELKEPKLGLK

SEQ ID NO: 35605 - protein, 70 aa, Homo sapiens
LSAKLHSTVYEPHSLEQGAPPLHAGSSSVKLGMTVLVSALWSISRRSLAAELSQWKLVRGTQMRNGPRPS

SEQ ID NO: 35606 - protein, 41 aa, Homo sapiens
VTMPMCVFLLVWSISRRSLAAELSQWKLVRGTQMRNGPRPS

SEQ ID NO: 35607 - protein, 67 aa, Homo sapiens
MTPMPTAMVQVAMSPTGMSLEAHLSGAHTAPPQATARTQPCWRPLRAARAQTLRAHPHPAVPLPTAS

SEQ ID NO: 35608 - protein, 41 aa, Homo sapiens
VARVSSALRSRPLALLPSAPASLRVSRSSSSPTRPVPHGSG

SEQ ID NO: 35609 - protein, 35 aa, Homo sapiens
LAVYMGLHFNYGLQKSLPVNSLHPHLPTPTLGNGL

SEQ ID NO: 35610 - protein, 90 aa, Homo sapiens
KMKLGGHSWICLLHFQLCSTSQRFLKNEDISALSSGGEVCLASASTLLLFTRCMHALSESGLCFPSRRDHPPRLAWDIFTSRHCIFLFAI

SEQ ID NO: 35611 - protein, 27 aa, Homo sapiens
TCGFYLLAILLCGRVVLTLHPRGPFLA

SEQ ID NO: 35612 - protein, 13 aa, Homo sapiens
MESRSHSITTYTT

SEQ ID NO: 35613 - protein, 31 aa, Homo sapiens
IPLSYSLFHPLLFLHSLLFFSSFFTQPFSFM

SEQ ID NO: 35614 - protein, 22 aa, Homo sapiens
IVQFLLLVGFLSCVSLVFVKFN

SEQ ID NO: 35615 - protein, 7 aa, Homo sapiens
LAAFLLL

SEQ ID NO: 35616 - protein, 17 aa, Homo sapiens
IFSALFMCGFLSPLPWS

SEQ ID NO: 35617 - protein, 106 aa, Homo sapiens
LFPLFSGDCSFPPFLSHHAMSILSGQCLQSLSYQVWFLSAYLCSFLPLRASLALSLPSPFPSSSFPPGFPWLPAANWAVLCPLPKSLYLWIGGSKSGRILTRISHP

SEQ ID NO: 35618 - protein, 163 aa, Homo sapiens
LRELPPGGREVQLLLGLCSPPRVSLASFPKAAQSWYEVRVGGSRPAWLLTATPGLVSRSLASITHPHQKLAAAATARAGGSSPRLDLQNLSFASKPSFQLGEGEEGAVAAVLLALSPFLSFSFCVQVTLHGILFFWDFVIFSNMSWDLRSCNGDAKDTVSGLS

SEQ ID NO: 35619 - protein, 38 aa, Homo sapiens
MRSQSSFFCFSPTSSRTQHAALPPQPQCAFLRALRRAP

SEQ ID NO: 35620 - protein, 71 aa, Homo sapiens
LAPPRPLGRVGLWMGMGIGIEQLGGGAAAGVFCPIPLPISSSSLPQTPTSPSSFPSRSPESICLPPLHNNN

SEQ ID NO: 35621 - protein, 82 aa, Homo sapiens
LLVLAPGSQCILSLLILAGSQGHVLPSHFTDAETEALRRMISDHTVFQVAKPGLEPGLLTYNLAERGTTTMSPCPWLHPVPI

SEQ ID NO: 35622 - protein, 66 aa, Homo sapiens
LTRLLLHVIYFSSFPPVETLLLERELQHGTETGRKKQRGLGDAPTEQPLAHSSSRGHEHQAGGQER

SEQ ID NO: 35623 - protein, 41 aa, Homo sapiens
LMDGKKSNSVTLWLTATSATLTHLLKRQEEERAASPVLGTT

SEQ ID NO: 35624 - protein, 14 aa, Homo sapiens
LVSSSFWLFLFFVF

SEQ ID NO: 35625 - protein, 43 aa, Homo sapiens
MNLQQAAFMVLPSPSSVSNCAGKHYASPGPLLSGTKRSGFQSH

SEQ ID NO: 35626 - protein, 29 aa, Homo sapiens
LPMGKSGVVRLFCLLLLKHKKESWILPSP

SEQ ID NO: 35627 - protein, 72 aa, Homo sapiens
LDLNLLFLLLLFFLFFFLPPTKGVPNYPGLFLPCCVSISSLLPSVCFFLHQWGPSCSPSLPNFDPSPLLAKS

SEQ ID NO: 35628 - protein, 42 aa, Homo sapiens
LPQDPTGEHSMPYYWVILGLCALYWRLCSASYQPGQGHTWLK

SEQ ID NO: 35629 - protein, 83 aa, Homo sapiens
LLCLLSATALLCSLGHPRPHLLRLPDLPSFPAFLWIPASGHPSPPSLQGPLLVSLLLEPLPPPPSLQNFSFTPHPPPLPPFLF

SEQ ID NO: 35630 - protein, 72 aa, Homo sapiens
LHGPSNAVTQGLVISVSSHPFFPRDTEEWLVFLDSSSATKLGLTALLGFLCVLCVSFILKEVILNVTLKRYM

SEQ ID NO: 35631 - protein, 42 aa, Homo sapiens
LLLGLPDLLLSLLALLSVPYSLGFRTFHFFLSLSLFPQKLEM

SEQ ID NO: 35632 - protein, 53 aa, Homo sapiens
LRWSRAEAVCLGEFSSIHLSPTLGSLFFLQLHQSNLSLPMPRSTVATTSVALK

SEQ ID NO: 35633 - protein, 16 aa, Homo sapiens
MHYLLFLMIFSLFHHD

SEQ ID NO: 35634 - protein, 49 aa, Homo sapiens
LMKTWTIEWSRNSPLSLTITVAFLWSSSSPRIPKTAAEFIKIKFVNVTT

SEQ ID NO: 35635 - protein, 111 aa, Homo sapiens
LGTVPERENLFSDPGSSRPLEICSWVILLLKRTTPAPRTPAAPPHGEMVSVKGRLDDEFMKLFLARAGHDLAESPEDETPALPGAHLLIRRTTNHLTSLDFASPLFSEGLD

SEQ ID NO: 35636 - protein, 42 aa, Homo sapiens
MLNITNNWENTNQNHSKILPVFMVLILPVLPLLMTYPRLSNL

SEQ ID NO: 35637 - protein, 53 aa, Homo sapiens
LNTLVLSFIHGGSPPPTWGAEGNLPSQFTYQKFLCRNMIVPSVGHHLWSSLSF

SEQ ID NO: 35638 - protein, 27 aa, Homo sapiens
VESKDPTLLTMIQLHVILLLIVYFWSL

SEQ ID NO: 35639 - protein, 37 aa, Homo sapiens
MHFLLSVTCGQLATSTVLDTFKLPRGEDRKLGHPVWD

SEQ ID NO: 35640 - protein, 46 aa, Homo sapiens
LAQHNQCSPMLQKTDCSLSLPTVFLVYLLPLFNSGKKFLLDLSNPF

SEQ ID NO: 35641 - protein, 58 aa, Homo sapiens
MHPPLSPPLPPGRILSGVFSTLSLLPVHSWVPLQHCHISLLMHLFPPCHSTWSLEQEA

SEQ ID NO: 35642 - protein, 16 aa, Homo sapiens
LIIFWHFILILGVKMV

SEQ ID NO: 35643 - protein, 47 aa, Homo sapiens
LMVFFLINSWCFFLGPFGLMLLSKFFLKKPHLVQKSVKLDSLNSVAV

SEQ ID NO: 35644 - protein, 61 aa, Homo sapiens
LRCLAMLYLFVKATSVASASLSGFLLLASGWEGLADEGKMSQVLKDEQVTGVGRMVREWTS

SEQ ID NO: 35645 - protein, 168 aa, Homo sapiens
LTFSSSLPLQTLLPLCESQPCMPTPVEPGDRSCEPLALSWTGWACDAISPVSSPPPKGLPSWGGGTVGPVLSCFYRKSCSRECEVVQVGAEALMASCFLPTTWPVPTQPLRWHIWRAGVEGPPPHMPFWGEALWLPHSPWMGVAPLSPNHSIHPIQETNMVAILHKKR

SEQ ID NO: 35646 - protein, 41 aa, Homo sapiens
VEALWCPLLPGALPASLPITMPQPQPGPLQCLGLFQSSRAI

SEQ ID NO: 35647 - protein, 48 aa, Homo sapiens
LKSNLKIMDNLRPIYAESAIPVLFALMLCCYHLRFFFFGNYFEWQNKE

SEQ ID NO: 35648 - protein, 84 aa, Homo sapiens
VARVWRLTCEGGQAGGGVRRRLPRGRGGAHTGDRPQLHFLIALLPLTSRHGLEIFTSLLCISFTLFAAIGGSVFCFTMSYTAMY

SEQ ID NO: 35649 - protein, 61 aa, Homo sapiens
VKGQTVLGRQLFIGRVRVPVRPWEGFLPWGFLPVSPWCPSWGLATHALCWAEAVPGRALVH

SEQ ID NO: 35650 - protein, 41 aa, Homo sapiens
MRLVSPGFWWVLPLRLGEALPGRRRQQPPGAMKTLRLREVK

SEQ ID NO: 35651 - protein, 41 aa, Homo sapiens
LGPSMTFSWIPHLPSVTCVSISFSSGIFFLQDSYLRYPVST

SEQ ID NO: 35652 - protein, 46 aa, Homo sapiens
MVTMSPGPSMTFSWIPHLPSVTCVSISFSSGIFFLQDSYLRYPVST

SEQ ID NO: 35653 - protein, 49 aa, Homo sapiens
MVTMSPGPSMTFSWIPHLPSVTCVSISFSSGIFFLQDSYLRNRWTWPGR

SEQ ID NO: 35654 - protein, 61 aa, Homo sapiens
LITSGFVSSRAMLSFSSFFLFPPSLLSFPLSPPLPSAPLPTTFPLSTFSSTHCLSAGGVDI

SEQ ID NO: 35655 - protein, 55 aa, Homo sapiens
LCLGLIKQQERTEELGSSAKQILPALVPIPAEFLYLVLLLIKGAPVSSFSPSPGT

SEQ ID NO: 35656 - protein, 39 aa, Homo sapiens
VKWLFPVHRALSHLPALILALQLTRTSQGSWSPFYKGEN

SEQ ID NO: 35657 - protein, 63 aa, Homo sapiens
LDTFNFMPFSLYLPLFLGTLAHFVTVKDYCPVTSLIRNLNCIHSECFKLSHKLHLPMDLWLFC

SEQ ID NO: 35658 - protein, 93 aa, Homo sapiens
LFWFLFPFVLPVSTRGPRGLPDHGDEPLASGLAPHHHANRTTAHWLHPISAISTPLLFMLSPRKAARALALELDLRWGADRGGWGMWDTVWWA

SEQ ID NO: 35659 - protein, 57 aa, Homo sapiens
LAAQGLLWASTIPSVREFLLLAAKLAFERTAPAGTPGGAGTCCGHLLGPCLALSRLP

SEQ ID NO: 35660 - protein, 24 aa, Homo sapiens
LLWRQMNWILIVTLLFSPCVTLEP

SEQ ID NO: 35661 - protein, 103 aa, Homo sapiens
LSQKFLFPSLEFIIRLGFGDKVYVVFFFFFLRRQSCSVIRLECSGAISAHCNLHLLGSSNSPASASRVAGTTGACHDAQLIFVFLVETGFHHVGQDGLNLLTL

SEQ ID NO: 35662 - protein, 86 aa, Homo sapiens
MLALKEWSFALGHHCVVLGILSSVNQKSKISHWSKVKVSFGLVASRGSAGRLFFLSFSAFRSCLHSLAPSSHHSNQLPSLQSITFL

SEQ ID NO: 35663 - protein, 40 aa, Homo sapiens [sequence omitted]

SEQ ID NO: 35664 - protein, 13 aa, Homo sapiens
LLWFLWTGLLTLP

SEQ ID NO: 35665 - protein, 57 aa, Homo sapiens
MHMWLWSFCGGNLLQFRLSGQANPNSFRTGSQRLLTERHMPPHGPMGMLIFSVHIGT

SEQ ID NO: 35666 - protein, 73 aa, Homo sapiens
LHLPVILHLLLCLHLLLLPHPFLQPVYCFLPPHLFFPLLRLPVLLLHPYLLHLSLFFPLLCIHLPLQVCLQLI

SEQ ID NO: 35667 - protein, 43 aa, Homo sapiens
LKRLGLSLLVHASSASGQQVYKGGKRLLLDFFFSFFYKSKLPP

SEQ ID NO: 35668 - protein, 33 aa, Homo sapiens
LPLKTNRTKTKHQGHISLSFLISVLYIEGVHIC

SEQ ID NO: 35669 - protein, 69 aa, Homo sapiens
MRRRSCRCVCFNLSLVPYCGSCCGFDHVVTLGRSPACIGLLTARKPHFYLPDFYFGKFRFKRICRTLYR

SEQ ID NO: 35670 - protein, 46 aa, Homo sapiens
LGGNYRDFSNNILCQMLPSLWSMGFHFCHISFLGKGLLPPVPAEPS

SEQ ID NO: 35671 - protein, 30 aa, Homo sapiens
MTSHWPAQTCLCLSFLSSKLHKTAYIRGWL

SEQ ID NO: 35672 - protein, 35 aa, Homo sapiens
MTSHWPAQTCLCLSFLSSVSTGYVSHCQIPDHKSP

SEQ ID NO: 35673 - protein, 43 aa, Homo sapiens
MVTAPGQLLPVPPASAQLLTRKHHCLGPSLPAAPITSTVSSLG

SEQ ID NO: 35674 - protein, 75 aa, Homo sapiens
VSPTLSPLTPFLHLMMQLTLASPLQPAVLPTSRDVCVCVCVCDCVCLLTVVFVATCLWMVLCLLVNCGLAFPGRG

SEQ ID NO: 35675 - protein, 60 aa, Homo sapiens
MVRLRDAALPCPALSAPAPLKFSIQWRALAGWPSGRAVPGCSLTLANLDLRLTCCGSGRG

SEQ ID NO: 35676 - protein, 26 aa, Homo sapiens
MHVTTSLSFVFPTFQMGCSGPCCLPE

SEQ ID NO: 35677 - protein, 72 aa, Homo sapiens
MFLKLSAKLIYLSIPSWSESQTSARHGRLCRHSSGKKRELPSPSSRCSPAGPPSPGRSAPLPSSFHFCRLRN

SEQ ID NO: 35678 - protein, 39 aa, Homo sapiens
KFPPRDAALLPRPPLSHFSWCGLGFLGFLFYLVCVVHQL

SEQ ID NO: 35679 - protein, 23 aa, Homo sapiens
ILRTGIFVSALLMYPQQPELPDI

SEQ ID NO: 35680 - protein, 65 aa, Homo sapiens
IEKMEQDAHYCLVLLPLSRLAVGLMPVRRSRLAAKLSWSQAVTLDLGSHWPSICIQKASLCLLAA

SEQ ID NO: 35681 - protein, 9 aa, Homo sapiens
LLFLYFVLF

SEQ ID NO: 35682 - protein, 80 aa, Homo sapiens
VCVSARAPGRGIWARGPRCDSPRLRSALHCGVPALAGKNFILGKLLFLFPSSSAPIFCSSSFSSRLNEPREEKPKRKGRK

SEQ ID NO: 35683 - protein, 45 aa, Homo sapiens
KGLQGDGLGGRRFLFLLPFCLCSPNVPVSPLPHLGPLFGPCGQSC

SEQ ID NO: 35684 - protein, 32 aa, Homo sapiens
MFVFEVDCWDSRTLLLFSYVISASALCCFTSL

SEQ ID NO: 35685 - protein, 38 aa, Homo sapiens
TRMMRTLRCVTMTMMGCFPSLESVTWGKQGGPGKRMKN

SEQ ID NO: 35686 - protein, 34 aa, Homo sapiens
LCILKARRRGEQNQLDPSITVGGFNFSFFLVIFF

SEQ ID NO: 35687 - protein, 14 aa, Homo sapiens
LLLMIVRTTSFLLL

SEQ ID NO: 35688 - protein, 43 aa, Homo sapiens
KWYKILLIYFLIMLISNEDSCLKIFFNLMVSIFCKNHVNLFHS

SEQ ID NO: 35689 - protein, 34 aa, Homo sapiens
LYIATSLWRGHLGSPPLVLLPVCVLVLRMRTVCL

SEQ ID NO: 35690 - protein, 61 aa, Homo sapiens
KNLPCKFIIECARAVWSWIQPPWLASLSLMSLPLCSLLWESSALLDMRLEGCLGLPTHKLC

SEQ ID NO: 35691 - protein, 23 aa, Homo sapiens
LAVSVACVALAPRSSISGADVWA

SEQ ID NO: 35692 - protein, 8 aa, Homo sapiens
VLFFLKLW

SEQ ID NO: 35693 - protein, 16 aa, Homo sapiens
LFAFGLASFIFLIHRG

SEQ ID NO: 35694 - protein, 41 aa, Homo sapiens
IPRRRPPGTRPRTRRPGHAPAKMAGAGAQLSVAAAAALPRS

SEQ ID NO: 35695 - protein, 53 aa, Homo sapiens
IFLKKPASPRKATAVFFFFASFSYFRSRGFSCFSSLFFLFANKTKNSIEERAK

SEQ ID NO: 35696 - protein, 50 aa, Homo sapiens
ISGRLLLVLLGEVLDLLLEPLLPLFQSFHGAGKVLQLLLRVGELQGQRPG

SEQ ID NO: 35697 - protein, 27 aa, Homo sapiens
LPPCPSLVLLSHFLLSVCLSLLPEEMG

SEQ ID NO: 35698 - protein, 12 aa, Homo sapiens
LITLIFIKHVFI

SEQ ID NO: 35699 - protein, 47 aa, Homo sapiens
MMGLVVLKLFLRLLFKLASCSVLPIGVTRERLGGRRREYASCFFCSC

SEQ ID NO: 35700 - protein, 31 aa, Homo sapiens
MFAYFLTGSGVILAHCNLRLPGSSDSPASAS

SEQ ID NO: 35701 - protein, 9 aa, Homo sapiens
LLAAVFAVF

SEQ ID NO: 35702 - protein, 39 aa, Homo sapiens
VTRMMRTLRCVTMTMMGCFPSLESVTWGKQGGPGKRMKN

SEQ ID NO: 35703 - protein, 40 aa, Homo sapiens
LFFYCCAAYFFSLFFCSSFITFKSLDPGALLMYHPMESLF

SEQ ID NO: 35704 - protein, 42 aa, Homo sapiens
RRRRESPGLMKCSRILIYKQAAVVIYATPVYSVSFLSYGYRS

SEQ ID NO: 35705 - protein, 76 aa, Homo sapiens
VRLRVCPVLPSERSLCLRSLTILILSSCWMSFTQKINSTWFLNFCTKISRNSWMPLLSLAFLFPSSRAICSSCSRA

SEQ ID NO: 35706 - protein, 26 aa, Homo sapiens
LPWLLLTVSTSCTGKSPGLAIAIWKL

SEQ ID NO: 35707 - protein, 8 aa, Homo sapiens
ILFLVGLT

SEQ ID NO: 35708 - protein, 32 aa, Homo sapiens
ILSTRESPSDTQDFSCLLLVLLLFFFFSSCMR

SEQ ID NO: 35709 - protein, 50 aa, Homo sapiens
VGIKRRKAALLELCGLLQVRVAGNRTTLLLEEKEEFIFSRHKKSSFFFRC

SEQ ID NO: 35710 - protein, 154 aa, Homo sapiens
MWDVGFASRFPVPPTSPCWCLHLLPSILQCLLLWAWPQGYGQTPVPSQRPLVIVPWHVGRGPAGSAEELRMEAAEEALMGPTIPDPSLLPGGPLVSFLVWAEAITWMPTWEGTSNVGPQPLSSSKSLHSHGDTLHLFPRDRLDPETLDPGPPLE

SEQ ID NO: 35711 - protein, 26 aa, Homo sapiens
MRAARLAPLLLTHARLRAGQRSSSPL

SEQ ID NO: 35712 - protein, 15 aa, Homo sapiens
VVSVFLLFTLPESVL

SEQ ID NO: 35713 - protein, 41 aa, Homo sapiens
IMVCRALAAAFLLLEAAKGGSGESTWSFQRWGSGCSRPKPS

SEQ ID NO: 35714 - protein, 9 aa, Homo sapiens
LYRDCVHRI

SEQ ID NO: 35715 - protein, 9 aa, Homo sapiens
VNMAVEEDS

SEQ ID NO: 35716 - protein, 42 aa, Homo sapiens
TLVSTEATGSQPGLCGTEVALSGRAAGDARKAGLGGSGCSCG

SEQ ID NO: 35717 - protein, 56 aa, Homo sapiens
RIWSLKICLTWYIRLLSQSQVTEHAFPTIYLQMHSILTLLELKRQIGEEDKINICK

SEQ ID NO: 35718 - protein, 35 aa, Homo sapiens
VTRFPPTLSPVSIVGLSLNPLVWIILSRLALLSLF

SEQ ID NO: 35719 - protein, 241 aa, Homo sapiens
IDLFKNIFQLVGLDLFVFPYRVVATAPGCGVIECIPDCTSRDQLGRQTDFGMYDYFTRQYGDESTLAFQQARYNFIRSMAAYSLLLFLLQIKDRHNGNIMLDKKGHIIHIDFGFMFESSPGGNLGWEPDIKLTDEMVMIMGGKMEATPFKWFMEMCVQATWLCGEPGPYMDVVVSLVTIMLDTGLPCFRGQTIKLLKHRFSPNMTEREAANFIMKVIQSCFLSNRSRTYNMIQYYQNDIPY

SEQ ID NO: 35720 - protein, 30 aa, Homo sapiens
RTWGSILQNSSWLFQDLGLHLAEGCFLETP

SEQ ID NO: 35721 - protein, 52 aa, Homo sapiens
ILRWIPASSTTMCSEHVEEKKQLYLLVSFCLSSWTLTFSETQQSLQWSVGPP

SEQ ID NO: 35722 - protein, 29 aa, Homo sapiens
MKCSALFSFPCCPWGWRSTGLPGSGLQPP

SEQ ID NO: 35723 - protein, 43 aa, Homo sapiens
MSPGLPFPPRLRPTRWSFPSVLTTSVFLMPDPGAEIFVERINV

SEQ ID NO: 35724 - protein, 48 aa, Homo sapiens
MEDYIISILNLAQFYYSLITVLKTFNWPGTVVHACNPSTLGGQGRRIT

SEQ ID NO: 35725 - protein, 63 aa, Homo sapiens
MEPAGFWCRRTSQHVSAILGTLVHAVSMRTSWPWWLPARRSRPSPPWWWSPSWPWLSLSSHVC

SEQ ID NO: 35726 - protein, 34 aa, Homo sapiens
MLQAADLSGIKHMTPVEAEATPSWKLTCHIDLTE

SEQ ID NO: 35727 - protein, 36 aa, Homo sapiens
MSSANHCPPSTHSGKWSVMQPCSLPSRTVHRQGLPH

SEQ ID NO: 35728 - protein, 29 aa, Homo sapiens
MRTSNNGLPWLPLLPHFSTLGILASPPQL

SEQ ID NO: 35729 - protein, 16 aa, Homo sapiens
MGLLEMRKSMTLQGLL

SEQ ID NO: 35730 - protein, 51 aa, Homo sapiens
MFTEILIVVSLPQDFIVWKMPSPSNLSSRPGSPKVTNFNGALKLNRNHPSH

SEQ ID NO: 35731 - protein, 30 aa, Homo sapiens
MTPSIHARRPHPRPALALRPAPRAPSGQWP

SEQ ID NO: 35732 - protein, 20 aa, Homo sapiens
MLIVLFFLLAVHFGGYYKEI

SEQ ID NO: 35733 - protein, 93 aa, Homo sapiens
MSFRNKIFLSVSSTCLPLNLWMSPPSSPVQKPQRAGSLQWRITTRKVASGKLSAQPSPWILTFRFIRWQCRECPRVGSPRNCWICMELVPDIS

SEQ ID NO: 35734 - protein, 53 aa, Homo sapiens
MTPLQAKEHGALLGTTGRSQKTGLELAFPHSPRRNPPWCHLDFGLLAFRTGRE

SEQ ID NO: 35735 - protein, 138 aa, Homo sapiens
LGFLHARVASCSTSLSLILVSTSSPGKFPFSRLALPTRASDFHPSFSLLASDYPPPIPPRPAAQLPPPFTRTGTIIPTPLRPVWDSTCLLPNPTLISAWSLPLWPNLSSRLIGDGHSHSLVPNTSSWMDSRHPCPLFN

SEQ ID NO: 35736 - protein, 15 aa, Homo sapiens
LMNPDPLGFGYRMWK

SEQ ID NO: 35737 - protein, 64 aa, Homo sapiens
ITYACMPLTPAGPTPIMILCPKLIYTSGSSSLLKTNAQMLFTDIYILVSLSCPTLLLFPIPNSS

SEQ ID NO: 35738 - protein, 76 aa, Homo sapiens
TALSPRERVSSPARGTQSARVVTATSRRGTSHLALQVVSAPIPLTEAESFGPPWALRLQRSMSAVLWNPECSCLDG

SEQ ID NO: 35739 - protein, 36 aa, Homo sapiens
VFFFFLFILPPSKDTKVASAERFGGGGSFSPRRATV

SEQ ID NO: 35740 - protein, 13 aa, Homo sapiens
MCPVNLAFFVWLG

SEQ ID NO: 35741 - protein, 48 aa, Homo sapiens
METANPTQETVFENRASATCMMWIGEMVCPPSHGMSLLCSGIFPSLGF

SEQ ID NO: 35742 - protein, 9 aa, Homo sapiens
LLLFLILLS

SEQ ID NO: 35743 - protein, 9 aa, Homo sapiens
LLLFLILLS

SEQ ID NO: 35744 - protein, 28 aa, Homo sapiens
VEYCCAVPSLPETTAACILHRARRSADA

SEQ ID NO: 35745 - protein, 34 aa, Homo sapiens
MREKNKAAAWSLFTMFIAKSFRNKQFPCTVSCSL

SEQ ID NO: 35746 - protein, 52 aa, Homo sapiens
LPLKRRQQTKSSSFFPMTSTVCAMVPVARARAVPVRTLKTSSPLPLTFSAVI

SEQ ID NO: 35747 - protein, 33 aa, Homo sapiens
LILSVRHQAVEEESMATLYLLIYSFCIYQAQFW

SEQ ID NO: 35748 - protein, 12 aa, Homo sapiens
KMKMLLAFAVST

SEQ ID NO: 35749 - protein, 8 aa, Homo sapiens
MQCPGHHL

SEQ ID NO: 35750 - protein, 71 aa, Homo sapiens
LFRPGSGRPRHAAARRGARVAAAAAAATPAARGRPPGRSHGPEWRRPPGPRRPLCLRAAPALLPECCTIFG

SEQ ID NO: 35751 - protein, 39 aa, Homo sapiens
LGVASSCQIPCSPGDPEKHRAIPDPGTFRRLAAIWVPSS

SEQ ID NO: 35752 - protein, 26 aa, Homo sapiens
LFYDSLVVFLSVFLSFLSPMPVACRK

SEQ ID NO: 35753 - protein, 36 aa, Homo sapiens
MEKERDAWPAPCCFSHVSEEGTRLVSGDTNLDVQPS

SEQ ID NO: 35754 - protein, 23 aa, Homo sapiens
RQRDFFFLLVFFFPPSLFILKRI

SEQ ID NO: 35755 - protein, 25 aa, Homo sapiens
KAEVCAFFFFSFLVVCTSLGMEGNK

SEQ ID NO: 35756 - protein, 37 aa, Homo sapiens
MNRLLSAGPGFGEAAPISGLCSHLPSVPPPTEGRPCR

SEQ ID NO: 35757 - protein, 9 aa, Homo sapiens
MFAYFLTVA

SEQ ID NO: 35758 - protein, 75 aa, Homo sapiens
MPLTFLAVWSSTTCGCLGRRCETSRGCLLQEALREAQQSPSFCTEGLLVPLGKGPLPPPVQKLPLKSVLGFPSSG

SEQ ID NO: 35759 - protein, 59 aa, Homo sapiens
MDSHLLGARTLPPSLPPASITTSLARLPSQPSLAANPSSIPQQAPLPAPQLLHGRRVRS

SEQ ID NO: 35760 - protein, 26 aa, Homo sapiens
MPLPVLLCLTLPMPLPSATARGGNRT

SEQ ID NO: 35761 - protein, 30 aa, Homo sapiens
TNPSIKKRPLIRRRLLVSFLGTHSGFLQSR

SEQ ID NO: 35762 - protein, 17 aa, Homo sapiens
IFYIYMRRVSQLLIKLL

SEQ ID NO: 35763 - protein, 51 aa, Homo sapiens
IMNISTNKKIISWYSMLNMETAQFSWRTVHLMSLDILSMIIQYLLMGSLFS

SEQ ID NO: 35764 - protein, 36 aa, Homo sapiens
VRNSLKFASCLGSCLSLFQLSRMPTRIQLDLEEERN

SEQ ID NO: 35765 - protein, 13 aa, Homo sapiens
IMQAWVFFLTISA

SEQ ID NO: 35766 - protein, 61 aa, Homo sapiens
VPQLRWPWPWGDRLMKSFETCLCLAMWDLTASLTSWSTSLLLKDSVSTSFVLVRQALANPR

SEQ ID NO: 35767 - protein, 16 aa, Homo sapiens
VGPLFLHLMIGWFSNW

SEQ ID NO: 35768 - protein, 22 aa, Homo sapiens
RKWSIGMKWLLVAAWRTPAALL

SEQ ID NO: 35769 - protein, 34 aa, Homo sapiens
LQLLCRFFVTFFSQVFQLCACSLESPVTTEILKV

SEQ ID NO: 35770 - protein, 42 aa, Homo sapiens
LKLLFKTRKRRRKRKKRKMLGNIYLTCSTARTLASCCYSCKY

SEQ ID NO: 35771 - protein, 14 aa, Homo sapiens
VGGFNFSFFLVIFF

SEQ ID NO: 35772 - protein, 20 aa, Homo sapiens
LVQFKFILPLALGGLGPTSE

SEQ ID NO: 35773 - protein, 10 aa, Homo sapiens
LYGLDLFLLF

SEQ ID NO: 35774 - protein, 56 aa, Homo sapiens
MSKSVWTKMPKVLRLIFNTIKKKNLKKMELFLPTTMTVTGSSSRDWLASTIMHVLL

SEQ ID NO: 35775 - protein, 53 aa, Homo sapiens
LTFYCSLFPRVTPRLVVSSSALFLLYFIHNSQRCWTRMGRPPVAMSPPRCSWG

SEQ ID NO: 35776 - protein, 37 aa, Homo sapiens
KFPYVISTDSCVFIVNSCLFLSYIYFFVIKLQLYFVF

SEQ ID NO: 35777 - protein, 13 aa, Homo sapiens
MKCACSSALLFLV

SEQ ID NO: 35778 - protein, 32 aa, Homo sapiens
IATSLWRGHLGSPPLVLLPVCVLVLRMRTVCL

SEQ ID NO: 35779 - protein, 22 aa, Homo sapiens
RVLNMPRTQIPALLLLVLHGHL

SEQ ID NO: 35780 - protein, 18 aa, Homo sapiens
IHFTKMPIENTFSFLLLC

SEQ ID NO: 35781 - protein, 41 aa, Homo sapiens
LRITCTGLPSASLERMNLHHLTSLFSSYLLFVCLFLFLQLK

SEQ ID NO: 35782 - protein, 17 aa, Homo sapiens
KNSMTWITICFPLFTSL

SEQ ID NO: 35783 - protein, 34 aa, Homo sapiens
TAPRWMFGQLAVSLLSCCQECLCGQENRMWISCI

SEQ ID NO: 35784 - protein, 20 aa, Homo sapiens
ITELHSFLILLLILAPNKTG

SEQ ID NO: 35785 - protein, 55 aa, Homo sapiens
RATDSTEMETIRRLSIHLNKYLALTPPRRNSLMLWLIPWSMTSFMAKMVFFLHMV

SEQ ID NO: 35786 - protein, 27 aa, Homo sapiens
IQDFLFFATILTPLLHSFFSVKYVNNN

SEQ ID NO: 35787 - protein, 49 aa, Homo sapiens
ITAGGKSMMGSRVLRTGKLLEAAGAGPGSPALAVFAFGRGQSLLFQVPA

SEQ ID NO: 35788 - protein, 30 aa, Homo sapiens
IAWLTAGLVSVCCCTLWRFSLELLPEKAPL

SEQ ID NO: 35789 - protein, 44 aa, Homo sapiens
IAPTLRSQRCWMGGCRWWTSPCPSVAATWASTPLASGAPTCTSS

SEQ ID NO: 35790 - protein, 14 aa, Homo sapiens
IVLVFLPKITAGLL

SEQ ID NO: 35791 - protein, 46 aa, Homo sapiens
MRWHRCSSWGRCSCAHAHAAAPPKMAKSTSTCQAGADPPAAWTFDF

SEQ ID NO: 35792 - protein, 16 aa, Homo sapiens
LWILVIISSGSLVMAG

SEQ ID NO: 35793 - protein, 17 aa, Homo sapiens
LLVGFLSCVSLVFVKFN

SEQ ID NO: 35794 - protein, 31 aa, Homo sapiens
LLLRDTCEIYIGFFLMAASRIWKFYLGTRRI

SEQ ID NO: 35795 - protein, 43 aa, Homo sapiens
LRGSLSGPVEDAALRQVLALLPGAAPGPAAGAGAQLLGVPAHA

SEQ ID NO: 35796 - protein, 19 aa, Homo sapiens
MLFCTILICYSSQLIGMME

SEQ ID NO: 35797 - protein, 97 aa, Homo sapiens
LFFLLQHSPSSAYPHPQRLPSPAVLPLVAASPSPGPLHFQLLPPKFVLVSPFPALPIRSLFHLQLFFPASLFPPPMVSPWLLSTPLASSLVFPWPWH

SEQ ID NO: 35798 - protein, 132 aa, Homo sapiens
MAAATWDKESKCRLSRGHCHHRRHQSLPVGLTLRYSAPASHQPKCFTSKHGTRPSQRKPSLRVSGHYSPHSLFPGHGRRGACVARSRRFAGHMQLTWKLKRKKPGRTASSEEHKKQGRGCAGRRLIKNGVYL

SEQ ID NO: 35799 - protein, 122 aa, Homo sapiens
LPPATSTPPCSCPFLLLPFLLLSSLSSPPSSSLLLFPLLLSSPPLSSPPLLSASPCFSNTSLLSMFSLHVVPTLRTGGRRGWLSAWHLVSTQHMPAAAGTALISKSLLRVRCVPGALARGAW

SEQ ID NO: 35800 - protein, 96 aa, Homo sapiens [sequence omitted]

SEQ ID NO: 35801 - protein, 69 aa, Homo sapiens
VATRPLLPLPWLTASTRPQGYPVFYRPDPWQGQRAGQGNRGEDNGYSVFCVFLCVFFFLRKIQFISGLQ

SEQ ID NO: 35802 - protein, 37 aa, Homo sapiens
MPGTAAAVAAAAAAATATAATAAGPGPGWGLESLQWG

SEQ ID NO: 35803 - protein, 80 aa, Homo sapiens
MGSDSASFQIRSSSCHSRPRNPVAPSSPVSGPLGSHLHLLSLPALLSIFLEFALLPPRAHPRAHPCPCTVPCPYGFILYT

SEQ ID NO: 35804 - protein, 72 aa, Homo sapiens
LGSVGAPLLGRQGWTLMDSRQGDSPLALPLPRPPCHLPRTACPLSSLFLMLLCSFFSCQLIFICFLKKNGKM

SEQ ID NO: 35805 - protein, 15 aa, Homo sapiens
LELGLAFLLLSLQTA

SEQ ID NO: 35806 - protein, 19 aa, Homo sapiens
LLSALVLLLVLQKRQKNKR

SEQ ID NO: 35807 - protein, 34 aa, Homo sapiens
VAESGFQHQQPGSRGNVLLRHYAILTLLLFLLSI

SEQ ID NO: 35808 - protein, 46 aa, Homo sapiens
VKEDPLLFGLFRSAEVLGLILVSCPFLQRLQTSATRSYYETCIVVP

SEQ ID NO: 35809 - protein, 74 aa, Homo sapiens
LPAFWTPTVLTICVCPLATSQTQLSSIQPTSIELHCWQEALTVSRNGESISYPWRLNCTFKTNLAWKRTFPETL

SEQ ID NO: 35810 - protein, 42 aa, Homo sapiens
MLLIIFPLLLVLVLRVRTRVVGRGCFLTGLFIGTMYYLSNTM

SEQ ID NO: 35811 - protein, 28 aa, Homo sapiens
VVGLLAALTLNLSVRGEGICRCGFWSCS

SEQ ID NO: 35812 - protein, 84 aa, Homo sapiens
MAVWPEVSQNRLTRGLLLPNYQLRGSVPKREKRPKRKHQHLFTPSERHSVCLDCLLEISLSGKQWRNVISFNCFCTTKTLFWVN

SEQ ID NO: 35813 - protein, 66 aa, Homo sapiens
LGTRRDLDWGRTLSYLWEVVQPGHRFHLPLAEEDHGQDDSEHAGAGRGRYRGGDQHDQHSLAERCL

SEQ ID NO: 35814 - protein, 47 aa, Homo sapiens
LDFIRAFLLLLVASVPGKIGSQNLTAQRPPVATSFLQMESSEPTVRK

SEQ ID NO: 35815 - protein, 29 aa, Homo sapiens
MTRGKSASEEKSPCRAEVRDQGASSGLRS

SEQ ID NO: 35816 - protein, 150 aa, Homo sapiens
MLGSRVDRPKLSVAPSVVLEEDQVLVSPAVDLEEGCRLRDFTEKIMNVKGKVILSMLVVSTVIIVFWEFINSTEGSFLWIYHSKNPEVDDSSAQKGWWFLSWFNNGIHNYQQGEEDIDKEKGREETKGRKMTQQSFGYGTGLIQRNTQRL

SEQ ID NO: 35817 - protein, 145 aa, Homo sapiens
MLGSRVDRPKLSVAPSVVLEEDQVLVSPAVDLEEGCRLRDFTEKIMNVKGKVILSMLVVSTVIIVFWEFINSTEGSFLWIYHSKNPEVDDSSAQKGWWFLSWFNNGIHNYQQGEEDIDKEKGREETKGRKMTQQSFGYGTGLIQT

SEQ ID NO: 35818 - protein, 228 aa, Homo sapiens
VQAREGKRGPATLTGDFIRLPGTHTLSLTHSLAGLPAVCVRGGDRLGAARCQRSPAPRAPTRCALPRAEARPAGPRAGGRASARAEAARWLIRARRASPGPGAGRGPAQPSSPRAGPRRPGSADQEKIMNVKGKVILSMLVVSTVIIVFWEFINSTEGSFLWIYHSKNPEVDDSSAQKGWWFLSWFNNGIHNYQQGEEDIDKEKGREETKGRKMTQQSFGYGTGLIQT

SEQ ID NO: 35819 - protein, 62 aa, Homo sapiens [sequence omitted]

SEQ ID NO: 35820 - protein, 57 aa, Homo sapiens
MAQFPSSLPALTWSLGRLAQQPGGCRRHGVSSWVQGRHQAFFWLQERTRGWERGGKN

SEQ ID NO: 35821 - protein, 73 aa, Homo sapiens
LTSCRPCVYYLSSDVLSKCCTRARRHLRLPFRACSPPSLLAALWCSLLKALKSPLALRLVVRSLPVSLPTYTT

SEQ ID NO: 35822 - protein, 38 aa, Homo sapiens
LLLPFLLGFPVFEPWEAGCSRLLTLCLSLTNTKASISL

SEQ ID NO: 35823 - protein, 61 aa, Homo sapiens
LGFKVAAMGPLLWALLSVTGQSVSLPPPARPLLPPSETWPRKGAAARSDMVCLFKTGLALY

SEQ ID NO: 35824 - protein, 45 aa, Homo sapiens
VNSTDPACPPVACRPEARSRCVTLAGVQWLLTGMIIAYCSLELLD

SEQ ID NO: 35825 - protein, 56 aa, Homo sapiens
LSKGAERRQAKRTTCDMVGHAGIFQREARSRCVTLAGVQWLLTGMIIAYCSLELLD

SEQ ID NO: 35826 - protein, 87 aa, Homo sapiens
LATRPWAKSRRGYTWGLDVPSRLWWALSPGFLAACCACGSLGTVGLCVCPCVCMCVCMFLSPLDSCTKWLMGTISRQIVKIDRKSFS

SEQ ID NO: 35827 - protein, 44 aa, Homo sapiens
MANALFPPARMPPAKPLFPAASVPASLFSPGSVTFFPRMNRGHL

SEQ ID NO: 35828 - protein, 84 aa, Homo sapiens
LIVGSLLPSLGLSCPICRARRPGLVGLEGPFPCRHHVTLGLGFSFLWLVMLWLSLLDPSSPRDCLSHSTAPIAWLLVCGVSSSR

SEQ ID NO: 35829 - protein, 63 aa, Homo sapiens
LLLLCRVNSPSAHVLEGTLWSSVPTLSKQASSPRKASAVVTLPCGAAWLFPLAGAFSQPQRPP

SEQ ID NO: 35830 - protein, 305 aa, Homo sapiens
MRHLPPRLQLAQQPALAHAHPHAGQALRVPLLQPPLQPVVHAAQPRAPAHGRAPLQVPGVPERLLAAGRPARPPEERAAPAAQHRAAGTLARAARPARARARARRRRRRRRRRRRAPPAGHGAVSAPAPPPGPARSWVPGTPAPQRDSPSSPNPRPGAAAEPRALGLRPGGGSQAPPPWPVSQMRTLRAASLTQATQLVRLFGRLLWEGVPLPGLAPESPCCCRAGRPGRHPPRGWQESGLRAPEGPSAEEGESPPPPPRVLCFGMKGGRPPCPGVVGRGGCGGAISSSGPWDWCPEVSGVLTQP

SEQ ID NO: 35831 - protein, 22 aa, Homo sapiens
LRPGLLTFCPPLSAGSAWSKRC

SEQ ID NO: 35832 - protein, 44 aa, Homo sapiens
MFVVLISVFVPSRSVMPCAASVDGVMYNELHESLQGCLQHVFSK

SEQ ID NO: 35833 - protein, 185 aa, Homo sapiens
VRPGPRVRQPRRPSASLRPSRARPGRSSFPRPPPARLPAASRVGAGRGLQPLLKFESRNQQVRNPEIPDPLRKMFSPEGERRAAGAEGGLGALRRRLQDPPAGPGRADAGCSRGAAPRSEVRAAGARPRRRSAVRCCWCSKLFILCVYICGWSLCAWFFCLENTAWSMWLWGGVMHFFLVLKLKT

SEQ ID NO: 35834 - protein, 81 aa, Homo sapiens
LLRFPLWVPVLAAPVAAEAAVPGGREDPALWPVDAQRPGTDLPCLAWRLSCGHPSMGFIEISAISTPPKQFKGKQHFLLTS

SEQ ID NO: 35835 - protein, 49 aa, Homo sapiens
LQAGKMRRFFFFVSMMIFAATWLWRAADTPSYSRGCFLEADSVCSLVEL

SEQ ID NO: 35836 - protein, 62 aa, Homo sapiens
MGELAASANHGHSPCYPERKGTPGDLSKRKMLVHFYPRRHSHPRATQQWILKNKTLCRRIKE

SEQ ID NO: 35837 - protein, 39 aa, Homo sapiens
LALPASIVMLVLPVHRLLAAETTNFLQTRRCWWLLHSSG

SEQ ID NO: 35838 - protein, 36 aa, Homo sapiens
MPSRKLMLLGPSQADLGTSHALLSSTRPLHSILEED

SEQ ID NO: 35839 - protein, 24 aa, Homo sapiens
MWNCTQTVAQVLVALASTGSLLEM

SEQ ID NO: 35840 - protein, 26 aa, Homo sapiens
MTSGVLTVASLKASFCYVEHAALIQI

SEQ ID NO: 35841 - protein, 39 aa, Homo sapiens
IFFSWCVWWLFLSVEGKRRYHPRLSPTPLQNGFSDTPAV

SEQ ID NO: 35842 - protein, 52 aa, Homo sapiens
MGVQAKKGQKKKEKGRKTKQNETTQAATYSLKERIPGRETRQFLFLCDNKKR

SEQ ID NO: 35843 - protein, 42 aa, Homo sapiens
LLCSEVPRVQSPPHPILELVKATRDLLPVPSQTGLWGLRCLL

SEQ ID NO: 35844 - protein, 56 aa, Homo sapiens
LAGANRKFPTLLRFRGTVKQKPRLRIPGGDSDLVPGGKPVAEHLREIKERNKEVST

SEQ ID NO: 35845 - protein, 61 aa, Homo sapiens
IVFPNSTKRSHQRSMKRGSAAVAAAAAARLVGCGERLLQDLCLEGAGPEKLQEPSPEPKRL

SEQ ID NO: 35846 - protein, 135 aa, Homo sapiens [sequence omitted]

SEQ ID NO: 35847 - protein, 102 aa, Homo sapiens
LSLLLAVTGGAAALSALSPPGENEPQCPPARSQPCPGQRKTTRIPGSGRRPGWAAPVRAGDSAPPLAAVSGNWVPALRGFQRTGTPFPGSPAHPAGEGGRCR

SEQ ID NO: 35848 - protein, 14 aa, Homo sapiens
LLMEEKDGLCLELL

SEQ ID NO: 35849 - protein, 65 aa, Homo sapiens
LRVCPVLPSERSLCLRSLTILILSSCWMSFTQKINSTWFLNFCTKISRNSWMPLLSLAFLFPSSR

SEQ ID NO: 35850 - protein, 61 aa, Homo sapiens
TCGGRRAMIAAGEVRAPFTWGPSRTAPGPMPLQGPGASQREGEGERSWRGQIKANPQSADI

SEQ ID NO: 35851 - protein, 80 aa, Homo sapiens
LGLWSEETKMKFPRHRASVTGGIRFLIHTPTQQPPGNMTHLTPMGPKWALSCLRLWLIPGWLMCWEMGKAFLLKGSTQKA

SEQ ID NO: 35852 - protein, 34 aa, Homo sapiens
ILVSGKEAEETAPERQLHEKDQDVADFEVGRRRP

SEQ ID NO: 35853 - protein, 35 aa, Homo sapiens
LTLPLIKQFRPLALIVLAGVVCSRLKRWSEGERRK

SEQ ID NO: 35854 - protein, 53 aa, Homo sapiens
VTSASSPIVGKRETEILPVTEHMRMQQLLGVTGFLWVLCEEYAFIPVSGRGEE

SEQ ID NO: 35855 - protein, 12 aa, Homo sapiens
VHNPKGRLVTYN

SEQ ID NO: 35856 - protein, 40 aa, Homo sapiens
LYAKELVLGAPWFRRQPPASSSFCCCSWGLCLLPTPALCP

SEQ ID NO: 35857 - protein, 11 aa, Homo sapiens
MSASGGLLGLF

SEQ ID NO: 35858 - protein, 46 aa, Homo sapiens
RMYVALRITCTGLPSASLERMNLHHLTSLFSSYLLFVCLFLFLQLK

SEQ ID NO: 35859 - protein, 58 aa, Homo sapiens
KNKADSAFLVADWMHPLEENDHEGQMAVKQEELASGSEENAVPLPHGLRCPACSEKLL

SEQ ID NO: 35860 - protein, 18 aa, Homo sapiens
KVSEHGSSNMREEESGVT

SEQ ID NO: 35861 - protein, 16 aa, Homo sapiens
LEQGFCCGGKRPETSI

SEQ ID NO: 35862 - protein, 25 aa, Homo sapiens
LAGLGTAELADFRSGPLLTAEGKAG

SEQ ID NO: 35863 - protein, 16 aa, Homo sapiens
LSSFTHLSDIPAIPEH

SEQ ID NO: 35864 - protein, 4 aa, Homo sapiens
RTWG

SEQ ID NO: 35865 - protein, 131 aa, Homo sapiens
KVDAQGLEAQRNPLRSVAPLSPVPKDYSAPQRFQCPQSNLSLKYWLSSERVPEDPALLKSEAVSPLIQRIRDSRNESIMEAAGGFQVHFHPSNGDGRFIETSSAADLEVISYSSKVSVTERCFIKVCTVLF

SEQ ID NO: 35866 - protein, 21 aa, Homo sapiens
LCVPLHGALGCGGQGQSPGAG

SEQ ID NO: 35867 - protein, 50 aa, Homo sapiens
LQPSGMAGRPTESAGEPRGVLESCMSGRTVATMTERPPWAKREVSCPASC

SEQ ID NO: 35868 - protein, 11 aa, Homo sapiens
KSQVMMPHLDW

SEQ ID NO: 35869 - protein, 62 aa, Homo sapiens
LFSFILLRATDSTEMETIRRLSIHLNKYLALTPPRRNSLMLWLIPWSMTSFMAKMVFFLHMV

SEQ ID NO: 35870 - protein, 21 aa, Homo sapiens
RRRGPPPVVFETRFGHRSFSL

SEQ ID NO: 35871 - protein, 16 aa, Homo sapiens
LVSAGGCCEALGSTQS

SEQ ID NO: 35872 - protein, 22 aa, Homo sapiens
MTHSRRKSKEELYKLLQFSIIT

SEQ ID NO: 35873 - protein, 88 aa, Homo sapiens
TRETGEGAGSGKQERERAALARIGRRRGHEQGLSTYCVPSRFTKGFSFDVHYSPCPGVLMPHLQRDKPDFGEVKSLAESRTARVCVTP

SEQ ID NO: 35874 - protein, 77 aa, Homo sapiens
VFSYPGESAMNLNHLLAGSCSCSFFADRHIVGAQENKCWKLEIELDSSTLGTRHESSPARGAPGFSRPRREHLRMGW

SEQ ID NO: 35875 - protein, 43 aa, Homo sapiens
LSDFERVTFSRRNLSCSIHKMGNMNSHPKTVWGGLNETTFPKL

SEQ ID NO: 35876 - protein, 87 aa, Homo sapiens
LAHLGTREQGPEENPEGLGPLQLAVTLPCLSTPLSLRSYLVSSMRIIQAPLQTTELEGPESYQKHLQFSYEKLKPRSDLCSQGHTAS

SEQ ID NO: 35877 - protein, 24 aa, Homo sapiens
MGKGRLIAARNGELVLRKCGVSWE

SEQ ID NO: 35878 - protein, 9 aa, Homo sapiens
MGITQRNAG

SEQ ID NO: 35879 - protein, 32 aa, Homo sapiens
VGRKQSGRIPGVWGAAAGRARASRFTPTSPAH

SEQ ID NO: 35880 - protein, 23 aa, Homo sapiens
ICGDRGSGCDWKLLEMAAMRTPT

SEQ ID NO: 35881 - protein, 17 aa, Homo sapiens
VATVAVAVTGSFWKWRR

SEQ ID NO: 35882 - protein, 47 aa, Homo sapiens
VSMEGLAWVCMEGLAWVSMEGLAWVCMEGLAWVSMEGLAWVCTEGLV

SEQ ID NO: 35883 - protein, 44 aa, Homo sapiens
KPRDTCWRADGICLAWAGVLALLLLSCRATSDDRLFPLSLSFSS

SEQ ID NO: 35884 - protein, 8 aa, Homo sapiens
VVAVRSEC

SEQ ID NO: 35885 - protein, 13 aa, Homo sapiens
IANPKIPVPGDSD

SEQ ID NO: 35886 - protein, 9 aa, Homo sapiens
LRSSGECRG

SEQ ID NO: 35887 - protein, 14 aa, Homo sapiens
VAGVRLWTKRRPRW

SEQ ID NO: 35888 - protein, 58 aa, Homo sapiens
VGAAEEMDINPGVKSQGMKPAGAGNLGFRTLRRLLGCLTLTLSGRILNPSWVSSTGMP

SEQ ID NO: 35889 - protein, 77 aa, Homo sapiens
IAFGGAPVACRIACGLCNLLRFKTDGHMCQWGSLSPGPKKQGTKFKTLASSQPLKPWPPEFPFLSLSFYFFYFYFYF

SEQ ID NO: 35890 - protein, 81 aa, Homo sapiens
IQHPSRHSAVSCLGVAAAMARKALPPTHLGQSWFCSCCRDTELAISALRARTATGSPGSCRCTAGPLPCASALESCCCRVT

SEQ ID NO: 35891 - protein, 28 aa, Homo sapiens
VWRSLRWSAETNEGARIGKFCLSDLYAS

SEQ ID NO: 35892 - protein, 21 aa, Homo sapiens
MCRNSSTELSERRSENGLPRR

SEQ ID NO: 35893 - protein, 76 aa, Homo sapiens
LWLMVRTTLLTVSKVGSYPLFWKPLCSTPLGSRKGSGQDLHLGADPSCSQLGPSPSVGTRKIFAHLEKLLVQPNFI

SEQ ID NO: 35894 - protein, 21 aa, Homo sapiens
IFSMPPPTCDFMTHIASPEPA

SEQ ID NO: 35895 - protein, 55 aa, Homo sapiens
INWLLGWMFSTSFLAANFSPIVFLLQQGEKVLCGPRRAVKLRVRGSVRGRMCVRV

SEQ ID NO: 35896 - protein, 66 aa, Homo sapiens
TADMAAERPAGILDRRGGFARPRIAGEWFPRGIGLPAAPALYCDAQPVMTGVESAEPPWPKETLPL

SEQ ID NO: 35897 - protein, 15 aa, Homo sapiens
LPRPLSLGNVKCGLS

SEQ ID NO: 35898 - protein, 66 aa, Homo sapiens
MPPTVRRGCWARPGWSLGLAGAAQNCLLRKRCSPGPPLSPGLRRTRRLPDQRVPEEDSVATGFSRV

SEQ ID NO: 35899 - protein, 129 aa, Homo sapiens
IDLFKNIFQLVGLDLFVFPYRVVATAPGCGVIECIPDCTSRDQLGRQTDFGMYDYFTRQYGDESTLAFQQARYNFIRSMAAYSLLLFLLQIKDRHNGNIMLDKKGHIIHIGQPATAPPSSPFTPAPRGG

SEQ ID NO: 35900 - protein, 66 aa, Homo sapiens
RKCWLAWCHAEGLRGQSPVGPRTLLLVGCFSPLLRLGNPFPHLHGAGVSGPGLSWLTAALGARLAG

SEQ ID NO: 35901 - protein, 31 aa, Homo sapiens
MRMQQLLGVTGFLWVLCEEYAFIPVSGRGEE

SEQ ID NO: 35902 - protein, 84 aa, Homo sapiens
MQLLFLVFVLFLFLFLIFIFLETGPCSVAWAGEQWHHHSSLQPQTPGLKRSSPLSLLSSWDYRCAPPHPAKTAILPLRVIRKIH

SEQ ID NO: 35903 - protein, 65 aa, Homo sapiens
MRHGRHDLAVAPAAAAGKVARCIRFGCSYLLRTHWMSSIVHSFLRLLQHPLREFHSCCPGWSAMA

SEQ ID NO: 35904 - protein, 26 aa, Homo sapiens
RTRAGVFALSTTALLQQCTRTRPGAG

SEQ ID NO: 35905 - protein, 69 aa, Homo sapiens [sequence omitted]

SEQ ID NO: 35906 - protein, 112 aa, Homo sapiens [sequence omitted]

SEQ ID NO: 35907 - protein, 25 aa, Homo sapiens
MLKRKHVFSSSCIFMWSCSLPNVED

SEQ ID NO: 35908 - protein, 42 aa, Homo sapiens
MVQEKRAFLHKRKHFLCSSSAVPMTFGGVISVNYTSKFLYPD

SEQ ID NO: 35909 - protein, 47 aa, Homo sapiens
MKVPVGSSVLSSLGSSVRALLSVSFSLSSSLGDRLCRHVGSAFSLLP

SEQ ID NO: 35910 - protein, 40 aa, Homo sapiens
MWFQTRSCGHHDPVGITGVTKVILPLFLCPLGMVETSLML

SEQ ID NO: 35911 - protein, 88 aa, Homo sapiens [sequence omitted]

SEQ ID NO: 35912 - protein, 37 aa, Homo sapiens
MQTTMKDWVLALPGSAAAAAAAAAAAPPPAAAARAPL

SEQ ID NO: 35913 - protein, 78 aa, Homo sapiens
MGFLKTVLLGTSACVSPPTMPAFFSLPAERRLQAWPQSEAPLSVSSCFQNRPPEPASFQNLRPEPASLQNLRTEPTSF

SEQ ID NO: 35914 - protein, 77 aa, Homo sapiens [sequence omitted]

SEQ ID NO: 35915 - protein, 151 aa, Homo sapiens
MERVLFFLLPSHLLNQGAAAAAARCTHTERSPQVPGAREARCTGTEWSSGLPRSTRKQSPGPSSHREPSSQSPSSPSSSSWSRHRQQQPPREQRQLRLPGPGSAETRRAPSDPAAAAALRLPSAAARATREAPREPARPAGAAGIRWLFLQ

SEQ ID NO: 35916 - protein, 246 aa, Homo sapiens
MFVKALRVHLGWELQVEEKSVLEVHQGEHVKQLLRIPRPQEKKKSWFQTRIYEWDPCFQFPSRMIGTIVLAFICLYLFIVIEFCVFVYVRDELDVLENNLESYITFTNHSGVLTPVILQVKELISVTKGVWVATILPAYLTCVSYLFHILVCYRKHMKRLWAGDKHFLPLKFHNPASSESMVAIARYSGWQIAYILWGYLIIHMVQSLCGMAIMYSLVLPIVQTRAWKCCKGWALGSLQYPSLWVS

SEQ ID NO: 35917 - protein, 28 aa, Homo sapiens
MRKRWMALSAAVIAASARELSIAAAPEA

SEQ ID NO: 35918 - protein, 74 aa, Homo sapiens
VLPKPLLPLWMLSLTLTHHCASLQTPRAQDWARPRDSHPFPSWEELACLATDSVSSNWLKWALPRVQLCGFYHA

SEQ ID NO: 35919 - protein, 57 aa, Homo sapiens
LSTSGALLINTSEKMMEPSCRSWGELRRCCHRCRAGPHSDRYLSRWGAARSAPGRRR

SEQ ID NO: 35920 - protein, 39 aa, Homo sapiens
MLSRPRPLPIVPGHKLKAQAGWMICRFMAGIATQALPYS

SEQ ID NO: 35921 - protein, 75 aa, Homo sapiens
LSKGEEEEEGWTFIRPLPSPILQERGQGQPTIYPLTNLVLTPLLCACVCVCARSGCLSICLAHLVPLLKGMGVRG

SEQ ID NO: 35922 - protein, 43 aa, Homo sapiens
MVFLSSLSNWLISCFLSECLILCFVSECLSSSKKGFLISSLFI

SEQ ID NO: 35923 - protein, 78 aa, Homo sapiens
MTPKQVPESLHPQLTISGSGVSLQHRDLRHNTSRGFIRHLGPGRKRNAEVVLPVAYLKAPSSLLWEDETLGCCKTSFE

SEQ ID NO: 35924 - protein, 52 aa, Homo sapiens
MSSLFNIFFPMPSLWIPTAGFCLLHAENKITYSLLMQSEAPEEQRAQLPEPH

SEQ ID NO: 35925 - protein, 60 aa, Homo sapiens
LPATPAVSYWLSEGIEVKGYCFYPLSFFPFLIKVLFSFFPENLSHQMRLLSLLWLVVFSL

SEQ ID NO: 35926 - protein, 76 aa, Homo sapiens [sequence omitted]

SEQ ID NO: 35927 - protein, 36 aa, Homo sapiens
LLRHYRAQAMDGKRSLLCFFSTVLIYTGMLKPSYFA

SEQ ID NO: 35928 - protein, 16 aa, Homo sapiens
MILVSSLIILLIVSTF

SEQ ID NO: 35929 - protein, 36 aa, Homo sapiens
LIDRLCFVFTSFFLGKTSVLSHVPLFHIFIFPLPRL

SEQ ID NO: 35930 - protein, 40 aa, Homo sapiens
LKVTRLLLPIFRLLLAEAERLTLHNMAAWCVWCPRADESR

SEQ ID NO: 35931 - protein, 96 aa, Homo sapiens
MTSTELWNICVAGRARRGTAQRRQVLEVLVNTGFQNSSRPAVFPARLKAGDTHAPVLEAVAFDQAWDQEVRPALRHQPKDPLNLPSPPANKGTSRC

SEQ ID NO: 35932 - protein, 42 aa, Homo sapiens
VGGKKLLSDTLVLLIISNLYFCVNVLCFVYHDYRIRNLCKYT

SEQ ID NO: 35933 - protein, 35 aa, Homo sapiens
LVDTGIIILLFFPEFFSFEFQLWTFYMCLHFSCLP

SEQ ID NO: 35934 - protein, 56 aa, Homo sapiens
LKKMKPYYLFVRFSTLLLYTVLRHYSLEVLTIYSLLKFNLLDNDVSTQDDFLGHSG

SEQ ID NO: 35935 - protein, 13 aa, Homo sapiens
LSSLCLLAALLAS

SEQ ID NO: 35936 - protein, 12 aa, Homo sapiens
VTSAVLVLLCVD

SEQ ID NO: 35937 - protein, 117 aa, Homo sapiens
MAMGQRTPSLAELRKSSATFLTCNLGAQAEKRTDQQLPATVPSLPGLGHMAQGAAEGWLAFSTMCPWNLLPQSGSPAPTHSNYTSPPGEGNTCIRIRGSSTGILKPFFFPLLHNISI

SEQ ID NO: 35938 - protein, 36 aa, Homo sapiens
LPQQLGRQMIQILGTFFCVLHRFVCHHAVKQVLRES

SEQ ID NO: 35939 - protein, 20 aa, Homo sapiens
LLAVISIFVEVGSENRYTVD

SEQ ID NO: 35940 - protein, 82 aa, Homo sapiens
MCCALWVSGIFVDEVICGMNFDRSRITNKMINVGTCLPCIIFTMILRISMYNLSLFLFFIRINRISELVESIETVYTTLIFR

SEQ ID NO: 35941 - protein, 128 aa, Homo sapiens
LASYGMRGSWHRSPLPAVVLPSVLQTALSPLALCQAWRRAVPHGVPSQRLRNQEASLVPKGVPRAWYPGPLQNGLWTHLEKGELLGLKPTPGGLLLLRSFWDPHPSRPFLCTLLPPPLRIFPPLRCSA

SEQ ID NO: 35942 - protein, 124 aa, Homo sapiens
LLVPLPSAAPSLVRDFPVALDLRIYSSTPSAPHYPESHRVSVVSPVDVAGVSWYCGGTQVVHAWDSGGRREGQLRVDVKPPFLFWTQPGLHCNLHQDQDPGPQAGMVLPRKGHFRRSPAWAIQS

SEQ ID NO: 35943 - protein, 36 aa, Homo sapiens
MGSFWLFGKGGCLLFISVVIPPPTTSSILQQCLFSC

SEQ ID NO: 35944 - protein, 58 aa, Homo sapiens
LAPGTGRRAPVAFGLMVWFGFCWKVQDGPCDRSPRAPSVVFFPVGGVRGGDQGQAAFC

SEQ ID NO: 35945 - protein, 38 aa, Homo sapiens
MLPNVLSCASVLSPCWGDRRGSGEALGLQSLALLCAVA

SEQ ID NO: 35946 - protein, 15 aa, Homo sapiens
MPAFDCPVEASSYAF

SEQ ID NO: 35947 - protein, 9 aa, Homo sapiens
MSCGLVLLW

SEQ ID NO: 35948 - protein, 173 aa, Homo sapiens
MGTGLVAVWHRPGTFLKEVGAGSDCSDVQSLWDASSALSSLPLPLGRVSNTNKRKARPPSQVSCEGVGARESLSLLLLRVFVCLFVCLFQILMDDKTTRICHLLAKRKPPPPHPSSMPGHSWGQSDVAGVGMPKMKLGRMTQSGRRGLGLQVSALASVGPHSFASFAPCLSFL

SEQ ID NO: 35949 - protein, 176 aa, Homo sapiens
VTGILGWIIRITLLLLKNTRSRGEYQRQGGSGRPPQPTSWPLNARGCQGRVSNTNKRKARPPSQVSCEGVGARESLSLLLLRVFVCLFVCLFQILMDDKTTRICHLLAKRKPPPPHPSSMPGHSWGQSDVAGVGMPKMKLGRMTQSGRRGLGLQVSALASVGPHSFASFAPCLSFL

SEQ ID NO: 35950 - protein, 57 aa, Homo sapiens
MSLTNMTSVFGTFVDVYFRMLCDSFQATTWLYFVVLKVLFLIFECICFSRSHFIGFF

SEQ ID NO: 35951 - protein, 78 aa, Homo sapiens
LFCQFSMGICVKMIQVSLFRRRQMYFAVSFCIFASGANTYFCFHYYSEKYSGCWCQKKRMIDGKQTPGYRHSSFCFRY

SEQ ID NO: 35952 - protein, 22 aa, Homo sapiens
LRTLAAPRRALFFRLGMLLTAG

SEQ ID NO: 35953 - protein, 75 aa, Homo sapiens
LNLTMFLGWSQLFRVPVCVISSAGWLSSELLEIFTHASANHFEQGCLLVDDLLFFMTGISGICFLAVFSTFLPPW

SEQ ID NO: 35954 - protein, 124 aa, Homo sapiens
LSLCKVWAFLFLFFKGNEMEFEGTFSLTPLLCVLHGACPRASANSSISSHSVLGTIPGLCWRDETAVEMKTGCRGWHSLAGFSPSGDSPTPRTLHTSSSHRSHLLFFFFSETTDHSDFSFPLFN

SEQ ID NO: 35955 - protein, 102 aa, Homo sapiens
LCWGTLLLYLFSSLFSLQCSKCSPCEMSSTLILLLFTDLLLCMRQGVRHSGSCIDDCPILEMSAVRGLQAEQPVRCVAPPGYQAWGLPLTHGEPSLTRAEFV

SEQ ID NO: 35956 - protein, 55 aa, Homo sapiens
VVALRPRQRATGLPVAPGFLCAAVCLLSCRPLSSAKRPCPTWPLGPVTFPSCPGK

SEQ ID NO: 35957 - protein, 90 aa, Homo sapiens
LWYPGALASMWPLQHISVASVSVVSFLCLAPHGFKSTRAGVETAHLALILSDWWFWPVSRYLSIGKAALRCGGHPDSHRLHSRNGSMRLY

SEQ ID NO: 35958 - protein, 39 aa, Homo sapiens
MKCGSILYVSTPTFSLPLSGTAEPGLAQQISLSTHLLQV

SEQ ID NO: 35959 - protein, 44 aa, Homo sapiens
MWPWNAEQNVDVLVVNVYILYSTFIYTLEVLIRERSVNCSLFFI

SEQ ID NO: 35960 - protein, 41 aa, Homo sapiens
VSPGGAWLGRRALSAAPILQILAEAFVMSAAAETGVLKAGC

SEQ ID NO: 35961 - protein, 44 aa, Homo sapiens
LRSKLSATSWTLGTLLRTMAFNSQTRTFRITKETGSFHILILVM

SEQ ID NO: 35962 - protein, 49 aa, Homo sapiens
VSLLIVLLSLPRSRFSIRLLGIRLFTRPHSRPTRALVAPWVCFILKRSG

SEQ ID NO: 35963 - protein, 37 aa, Homo sapiens
MLLSLVSNPLPLSLTPLFSTRLSLSPSPVRSGAPHRH

SEQ ID NO: 35964 - protein, 34 aa, Homo sapiens
LLGDFHSSCWDGRLNVGSFCMGYAELWVFLFFVF

SEQ ID NO: 35965 - protein, 59 aa, Homo sapiens
MGSSRGSAPGRQRNPSLLPLREGVDGARDLEHGRNRDLKESQDTGTRTPRRTRRVSELL

SEQ ID NO: 35966 - protein, 65 aa, Homo sapiens
VSPQMPTTVPSSMFPCSLFLLWSQLWELLWSQLWGLLQLWGWWLLPEPPQAPSLPPAPAPEPRLL

SEQ ID NO: 35967 - protein, 40 aa, Homo sapiens
MLCSLFHQLLLSGSPDLRGESPETLDSAAPELQHRIIWLL

SEQ ID NO: 35968 - protein, 83 aa, Homo sapiens
LSLTCLLLVHLSIAHLHHARINALLCNHTHPASRSIHPRASNITRIHQDHETTRSSGSSYSQDSIIFPSAVVGGCIFPNLCLA

SEQ ID NO: 35969 - protein, 87 aa, Homo sapiens
MPSIYNGGYQHFFLIFYNLQLLKTPLSTNTLLLKCCEMLSVWKFFFLRKTIKVLPSRALGLSGWCFLFVCFFACGNLFCFWLCVLFC

SEQ ID NO: 35970 - protein, 26 aa, Homo sapiens
MAVAEARPNSRLAAPWLARVCSFWAR

SEQ ID NO: 35971 - protein, 83 aa, Homo sapiens [sequence omitted]

SEQ ID NO: 35972 - protein, 75 aa, Homo sapiens
MSTQLGSPRALCPFLSAFLEHEPTQGTQQQGIPGQCRAHSPASSCGHRSGRSSPHLSPNMGFLEAQSFNQPASIH

SEQ ID NO: 35973 - protein, 46 aa, Homo sapiens
LRILPVIVPKHIPQEGGALWAKAGVGVIWGAATMPLPLVLAPAGSA

SEQ ID NO: 35974 - protein, 78 aa, Homo sapiens
LFFSPLIPGGQAGEGCGGEKDDREVDSKPHFSCRRKFLTKQIPQRTPYMTTAADQFLAMMFFFLLCKALESFILLYFF

SEQ ID NO: 35975 - protein, 13 aa, Homo sapiens
VILLSVFPQLLWI

SEQ ID NO: 35976 - protein, 86 aa, Homo sapiens [sequence omitted]

SEQ ID NO: 35977 - protein, 65 aa, Homo sapiens
LGQSRTGGRWAAGPILRITYCYRPCTPFAASLLLIWGCHQLSTLLVPLAGPREDGGMGVPGDPCK

SEQ ID NO: 35978 - protein, 49 aa, Homo sapiens
LGAASPQPPRAKNLFIKECFGTLLAGLAFLLSPPYTLNREPRCLGALLW

SEQ ID NO: 35979 - protein, 34 aa, Homo sapiens
LRRQRFLGFCLVLSLQKVLPVPPALGTRLCIASP

SEQ ID NO: 35980 - protein, 15 aa, Homo sapiens
RKFPRGPPRWLLCLM

SEQ ID NO: 35981 - protein, 9 aa, Homo sapiens
KWMVCLFAV

SEQ ID NO: 35982 - protein, 5 aa, Homo sapiens
MGRSD

SEQ ID NO: 35983 - protein, 17 aa, Homo sapiens
MLYPLTLRMLFAEVTFL

SEQ ID NO: 35984 - protein, 73 aa, Homo sapiens
LHFPRTSNINHPDFNYGITGATAYLLSRGQEDLCDWDFMDLASPARCVSNSWEYCSMIIELVSIVCFLFVALS

SEQ ID NO: 35985 - protein, 18 aa, Homo sapiens
LLLLFTLLLGFYEGFVKS

SEQ ID NO: 35986 - protein, 42 aa, Homo sapiens
LAGAGWRRRRLQARRAGCWCTAAGALWVLDACRLFGPATGFE

SEQ ID NO: 35987 - protein, 47 aa, Homo sapiens
VARVFGLCLLKPLMGGGACRRTGAGARVQKLGRWASSPTAVSRGRIP

SEQ ID NO: 35988 - protein, 29 aa, Homo sapiens
KDPTLGYLGVKMCYFTHRLVPHDQGLCLP

SEQ ID NO: 35989 - protein, 33 aa, Homo sapiens
LELMSRPAAAAAAAAAALSFVSRAVWARAGVPE

SEQ ID NO: 35990 - protein, 29 aa, Homo sapiens
VTRFTMMLRVLIMTMMPSWVLKKQRPLIS

SEQ ID NO: 35991 - protein, 20 aa, Homo sapiens
RKTVYLLLLMIVRTTSFLLL

SEQ ID NO: 35992 - protein, 16 aa, Homo sapiens
KHLLTVDLAKSLCCVS

SEQ ID NO: 35993 - protein, 14 aa, Homo sapiens
ILGALWTLVIINQE

SEQ ID NO: 35994 - protein, 59 aa, Homo sapiens
RSLTILILSSCWMSFTQKINSTWFLNFCTKISRNSWMPLLSLAFLFPSSRAICSSCSRA

SEQ ID NO: 35995 - protein, 77 aa, Homo sapiens
LVMSDVGFLIISILALLGVFGRLTLQPALHCAVCIRKPAHSAGVSSINKHQPQAPLSFDGNPLEFNFQIQILGTVGS

SEQ ID NO: 35996 - protein, 35 aa, Homo sapiens
LRSRCWLLSCIFGFAFAFLWLSSFEELYFCSFLEN

SEQ ID NO: 35997 - protein, 90 aa, Homo sapiens
ILLPGDPLSSHLLLLPLLLHRARARTPPGCRSRTAPARTTRRCRCCGTRRSRWPCPWCTRWWRRSASRATSSLCGCCAGAWGPDPRRSSS

SEQ ID NO: 35998 - protein, 73 aa, Homo sapiens
VASVSVVSFLCLAPHGFKSTRAGVETAHLALILSDWWFWPVSRYLSIGKAALRCGGHPDSHRLHSRNGSMRLY

SEQ ID NO: 35999 - protein, 12 aa, Homo sapiens
MVISYSVSALVF

SEQ ID NO: 36000 - protein, 32 aa, Homo sapiens
MSLPLCSLLWESSALLDMRLEGCLGLPTHKLC

SEQ ID NO: 36001 - protein, 83 aa, Homo sapiens [sequence omitted]

SEQ ID NO: 36002 - protein, 31 aa, Homo sapiens
RLPSFVVSQRCAGLLLAALRIQGVGCQVQVS

SEQ ID NO: 36003 - protein, 13 aa, Homo sapiens
IVLFLLLLIFSTE

SEQ ID NO: 36004 - protein, 24 aa, Homo sapiens
IHMSKLVIPFGHLMLSCCCVMELP

SEQ ID NO: 36005 - protein, 18 aa, Homo sapiens
LGCWNAWALLASSLAGLH

SEQ ID NO: 36006 - protein, 87 aa, Homo sapiens
MVSHRKDWRRVNLRFSSCLLLSICLDDKPSADELCFWTDHGRSQLTCPSLGVSQGQGLIMLPRLVSNSWPQVISLSQPPKVLGLKLH

SEQ ID NO: 36007 - protein, 14 aa, Homo sapiens
IRPPDSWALALALM

SEQ ID NO: 36008 - protein, 131 aa, Homo sapiens
MQPIPSFSGSTWAEDRCRGAQRRALTSQETQFGVAIVTHSPGVCFDLPLPPYYFFCYLVSPWYLRILQLPSGLTDGRIKEKWHRFHLKSYKHFTRWYSLGRAFVKQMPAHCFTLLISTSAKHFSRKADPEQ

SEQ ID NO: 36009 - protein, 8 aa, Homo sapiens
LVPHPPQP

SEQ ID NO: 36010 - protein, 22 aa, Homo sapiens
LDLSLIFWSLASCIFLEPQLNS

SEQ ID NO: 36011 - protein, 41 aa, Homo sapiens
MFGKLLLPRFIINIQIVYIKTVYFSSLLHISFFLVFIIIIL

SEQ ID NO: 36012 - protein, 39 aa, Homo sapiens
LPVLQPSMASLSLQIISFNSLIAPVSLDGFLLPTTKNPN

SEQ ID NO: 36013 - protein, 45 aa, Homo sapiens
MMTFMMGLKRKMLMMVSLLLLNNWTWEMKFTMMWIPLISLFHQQR

SEQ ID NO: 36014 - protein, 31 aa, Homo sapiens
MRRCCPWRCAPLSAPAWLPTPCPASRGSPIF

SEQ ID NO: 36015 - protein, 36 aa, Homo sapiens
VSMVTGLLYEVALRGLATISEGGSGLRPTAILCLPA

SEQ ID NO: 36016 - protein, 113 aa, Homo sapiens
MRLAWLYLFFLFCFGFFFFFGLTQDLKTGTVKVTAVGWSEHPPKFTMWPRTLIAHCCFFNSHSKYEMRCYRKSLAILKATPLLSKENGPVLSQVHTGEVIALLSCKLCNAKFF

SEQ ID NO: 36017 - protein, 35 aa, Homo sapiens
LSLMSLPLCSLLWESSALLDMRLEGCLGLPTHKLC

SEQ ID NO: 36018 - protein, 10 aa, Homo sapiens
IFFFFFFVQP

SEQ ID NO: 36019 - protein, 13 aa, Homo sapiens
RSVFSQCCHLSSV

SEQ ID NO: 36020 - protein, 63 aa, Homo sapiens
RRPLLCPVTFPSPGTAPRPSPASPCPSCHGSRKLWGPLGWTPWKSARSTLGPAGPPLYPSKTA

SEQ ID NO: 36021 - protein, 35 aa, Homo sapiens
LWSWRRTPRAWASASSAWAPGQTWAWRSWVSSSRP

SEQ ID NO: 36022 - protein, 33 aa, Homo sapiens
RKLAHLGRSVLLGFSLEHSLDLISSERVMGQHG

SEQ ID NO: 36023 - protein, 16 aa, Homo sapiens
KDLMGSLGCSMVGKPT

SEQ ID NO: 36024 - protein, 50 aa, Homo sapiens
IVLPWLSLWVQSLSSYLFPPCQPLMPARLLPLLEPLPDQLPLPVWLGFGG

SEQ ID NO: 36025 - protein, 46 aa, Homo sapiens
LCPKLIYTSGSSSLLKTNAQMLFTDIYILVSLSCPTLLLFPIPNSS

SEQ ID NO: 36026 - protein, 13 aa, Homo sapiens
ILALSSIIFGCCI

SEQ ID NO: 36027 - protein, 26 aa, Homo sapiens
MAHLSGQPCASCCWLWQCLSSAQLYP

SEQ ID NO: 36028 - protein, 153 aa, Homo sapiens
MRRDLTVLPRLVSNCWTQVILPSWPPKVLELQWTTFNALVLCTLTSTVMNTQLGQGSEILQSKEEGALNRWTLILLTKLWEETGASSLSETTVPLRLREMRRKFSALYCSSSPHSLLRPRQGVAFKHTDTYRQTHNTRLMVFPQTVSSGYGKE

SEQ ID NO: 36029 - protein, 62 aa, Homo sapiens
MWLRGCVCVWMCVGCGCPLRPSSSPSSSCSPLLSFSSSPLSSPSSWSSSPLSSSSSPLSSSP

SEQ ID NO: 36030 - protein, 62 aa, Homo sapiens
MSWQIWGTKSHVIPVTPHVLLMATFNTIPMWCIIQKENSWHVTISTTCTLSLSLMSLKSRSW

SEQ ID NO: 36031 - protein, 92 aa, Homo sapiens
MSGGWTSRKGSAGAGAGVRGLGPPTQAISPMLSSQQAERSEAPAPSSWEPAVHTPLTLPTSSFQVDRFFVLGFSTSPTPPSPVWHKVAPWWG

SEQ ID NO: 36032 - protein, 17 aa, Homo sapiens
MLPGDGVAERPRSLCLA

SEQ ID NO: 36033 - protein, 98 aa, Homo sapiens
MRGCPRTSMWLGPLRSWLVPSSSTPFSLGPMGTCTAWCEAATVSLSLRLPCSSARWPPPWRTVTSTVWSCVISSCVALSSLTVRGRSWCWRTWRTPAC

SEQ ID NO: 36034 - protein, 55 aa, Homo sapiens
MPRVQPPRLCLLLPLPPLPSQTRAHTRHLGRVSALRPPVWMGVFISEGGTARGAL

SEQ ID NO: 36035 - protein, 46 aa, Homo sapiens
RPNCFKMRYPSLTFSFLSTCHLTQDCALTLLLQLPLPGLLVLALWQ

SEQ ID NO: 36036 - protein, 34 aa, Homo sapiens
IHVSPIDDSRTSFKYTIFHSLFLLNFFILNFQIL

SEQ ID NO: 36037 - protein, 7 aa, Homo sapiens
LFLFFVF

SEQ ID NO: 36038 - protein, 40 aa, Homo sapiens
ILRVYAPMIGLVSKTNAIISLKKKEIGIQVNTTVPLNMPT

SEQ ID NO: 36039 - protein, 53 aa, Homo sapiens
KYTPLNKIWSMFVSLYLISPESGNYLYLLSVYCVPGTISMCIEKPWKAIQQYI

SEQ ID NO: 36040 - protein, 66 aa, Homo sapiens
LKKCKRFFFLRKNIFLKKPASPRKATAVFFFFASFSYFRSRGFSCFSSLFFLFANKTKNSIEERAK

SEQ ID NO: 36041 - protein, 28 aa, Homo sapiens
LRRLLGCLTLTLSGRILNPSWVSSTGMP

SEQ ID NO: 36042 - protein, 94 aa, Homo sapiens
LQIIDLFKNIFQLVGLDLFVFPYRVVATAPGCGVIECIPDCTSRDQLGRQTDFGMYDYFTRQYGDESTLAFQQTLASCLKARRAAISAGNPTSS

SEQ ID NO: 36043 - protein, 98 aa, Homo sapiens
LPQLVYLQGWGSYSLLRPAALISMVLLAREFLYPAKMSVSEVCSSGLSSPLLEQHKTNLIFYASGDICSANGKSGFNQPLPFLKTFCCTHRILSCTYL

SEQ ID NO: 36044 - protein, 115 aa, Homo sapiens
MLPPGQIPNPTLSTHTLSSGQERPENVCTNGFREALEIKEPEAATHGSQKLNAAQTTGMTSPILLPPAIAVTKAALGPQLSTSEDKSWGDSCHLREKEKTKRQRLLLEDPFTWAA

SEQ ID NO: 36045 - protein, 66 aa, Homo sapiens
LGLAAGSSCLFLHCFAPFVLRSNSAVRAGPPARPQPPRSHQLQLQLRSLRLPQSPAALSEAWSYFL

SEQ ID NO: 36046 - protein, 28 aa, Homo sapiens
LRLKCHVYLISLIFLFLQAYQSHCWLSL

SEQ ID NO: 36047 - protein, 82 aa, Homo sapiens
VPPHPRRRVHSLLAAGPAAAAAAAAEGMSPGRARRLPQATARRGTPSRAHRSTARTPAPCGTRLRSLEAVSVIRMHWAPRSW

SEQ ID NO: 36048 - protein, 43 aa, Homo sapiens
VGGESVSAPLLTPGSVDYELAPKSRIRAHRGKYLQYLPRPRFS

SEQ ID NO: 36049 - protein, 24 aa, Homo sapiens
MTVDRKTVYLLLLMIVRTTSFLLL

SEQ ID NO: 36050 - protein, 25 aa, Homo sapiens
LFRTMSALWLRRSATALAWPSLAAK

SEQ ID NO: 36051 - protein, 43 aa, Homo sapiens
MNSKAFVLCCFCNGMIPQGQRTSFQGKDVGLNTEENPPEIDHL

SEQ ID NO: 36052 - protein, 37 aa, Homo sapiens
MKLGKFSQRTCSVPLGVLCGFGVLWELKHTAMLESKT

SEQ ID NO: 36053 - protein, 60 aa, Homo sapiens
MHVGIGISQFSRARACTMFHLLGFVTYLLVCLGDSGVGRGESSSPINKLILYLPDSQLPC

SEQ ID NO: 36054 - protein, 45 aa, Homo sapiens
LTSWSSICQDVLQDSAALWASFLWLFVCFSFKNGPTLNHGRAISL

SEQ ID NO: 36055 - protein, 129 aa, Homo sapiens
LSFSARTRHLTLHFFRPPPGDPVFPFFPPLLILPLPATILSLPFTPSWQHPLPFPSLSHLLFPVARRSPSVFFMGTRCWRAVSRRNPVEGSEWRYSFSLHSSVSPVSPRSGNSFAKNGRNGQARLYHHL

SEQ ID NO: 36056 - protein, 105 aa, Homo sapiens
LPLPLLPPLVLPLSGARLPVAAAAASPARVGLRGLPPSQPRSFPAACKSAWLRVTCQCLRQRLREKNALHSFFHRHTVFYTKSHFYSNILLPLDIALGEVPGSID

SEQ ID NO: 36057 - protein, 59 aa, Homo sapiens
LKNELDLQMEKAHRIPLKFNEKKAASRHIRVTFLNFKDETFYKHPVRESRLLTKGQKSG

SEQ ID NO: 36058 - protein, 49 aa, Homo sapiens
MQKQRKGDLSFQCCITVWRKTSSKKLLWPGTVAHVCNPSTLGGRSGRIT

SEQ ID NO: 36059 - protein, 85 aa, Homo sapiens
MRCRGGPWKNLPMEGPQRDLWENNGNCRRVGQIIMATGLLEARPLKAIFCLWLERDCESFLRKSVALPGEVIKSLLAQEMKQQWP

SEQ ID NO: 36060 - protein, 46 aa, Homo sapiens
LGRDAGGDGARRACCWRVMALQGCGLRPHRESTARGSPKSEVLGER

SEQ ID NO: 36061 - protein, 66 aa, Homo sapiens [sequence omitted]

SEQ ID NO: 36062 - protein, 31 aa, Homo sapiens
LQFCIAFQFPLLVFLTVFPLYRGHLQLLIKD

SEQ ID NO: 36063 - protein, 36 aa, Homo sapiens
MKNSGSLTNSLTLLSTRKFKGGRTLRSKLQSRSSRL

SEQ ID NO: 36064 - protein, 35 aa, Homo sapiens
LWIHIPFPMRSLLLTASCFCCFYMGEEKELGISIV

SEQ ID NO: 36065 - protein, 62 aa, Homo sapiens
MTWTKCPLPLGPAFFTQCCLIGLLVPLLGWGNQNTQWYPTSKMPDLKDSKTTDLCQHVKHMV

SEQ ID NO: 36066 - protein, 36 aa, Homo sapiens
MTWTKCPLPLGPAFFTQCCLIGLLVPLLGWGNQNTQ

SEQ ID NO: 36067 - protein, 39 aa, Homo sapiens
MLGNEQIIPFDKPLMLGFHGKEKEVNKRKKCREKYGIEI

SEQ ID NO: 36068 - protein, 47 aa, Homo sapiens
LGSGGAGRGCGVSPQGSVFSAFPVLLFLTHFLSHSVTFKPFLLTVCI

SEQ ID NO: 36069 - protein, 69 aa, Homo sapiens
LRPSCVSPLRKAAEDLGGRQYPEDCGTLSAVPCSRLRRTRVGVNTLKIAALLPQSLALGCGGPGWASIP

SEQ ID NO: 36070 - protein, 39 aa, Homo sapiens
LALTIALACRWPLLPSLGPALPPEPPAPLQDSPYPDGVT

SEQ ID NO: 36071 - protein, 26 aa, Homo sapiens
MVALGLLVQSISPTLGVWRGAWEASH

SEQ ID NO: 36072 - protein, 131 aa, Homo sapiens
LLICLSSGCQATAAWGLAECARPRLHWRLTWQLPSLPPGLPNAGAAPLATSAFLPSAPSSLHRQPCVAQRLAPPSLCASVPPAPFIFLRPRAGVQLSGLGSLQPLPPGFQRFSCLSLLSSWDYRCMLPRPV

SEQ ID NO: 36073 - protein, 106 aa, Homo sapiens
MPATGFHHLRLLAGASLSLCPVLETGMCSTHLHTHSTDSGNNTSFGDPGFLVSPDFSGATMFLSSRRQHPRWKQVMACPAQLQSECRSHGERGIQPKAQATHSPPG

SEQ ID NO: 36074 - protein, 95 aa, Homo sapiens
MDGLFLNFFQACFSLPSAMSGSGLRPSPEAKQMTAPGFLYSLQNRLQMKFKKSAVTLLGPGGEQEEGRQQVWLGQIGEAQWGTFARQIERQAQRA

SEQ ID NO: 36075 - protein, 60 aa, Homo sapiens
MALWVEKRLLGNNRILRNLVGWRSTPKIKYRSRHGFKKIRISTASSERIRRASCMPAYLV

SEQ ID NO: 36076 - protein, 33 aa, Homo sapiens
MSQLERILGWSYCMLIVLFFLLAVHFGGYYKEI

SEQ ID NO: 36077 - protein, 17 aa, Homo sapiens
MKLAPSLIWTHLWSLWL

SEQ ID NO: 36078 - protein, 30 aa, Homo sapiens
LSPSSRVLESVVFQQFLLLFPWAAWASFHP

SEQ ID NO: 36079 - protein, 26 aa, Homo sapiens
MHQELLCFFFLVFFFFGCDFLFLLFI

SEQ ID NO: 36080 - protein, 59 aa, Homo sapiens
MLRNHLLYPGAAAAAAAFAFGAEFNKRASEQASAGGKRQRMSAIYPPLLGALSFIAASS

SEQ ID NO: 36081 - protein, 42 aa, Homo sapiens
LSGNFCVILLLKPNSTFSCCFFFFFFFFFGYLLIHVKYVVHS

SEQ ID NO: 36082 - protein, 68 aa, Homo sapiens
LVDTSPLLIPPLPISMPHLIQLDTYIPIIRRTSLEGVELVPGWLGSQLSLLLSPVVWIGVWPGQEYTE

SEQ ID NO: 36083 - protein, 99 aa, Homo sapiens
MPKDKRGARHNSPHFSFAVLRVLHLPALTALCGWLLSLPSPFPRLKGPQGLEGREAEWLCCGPACSFPFPLPLAATSPQHQQPRQQHGDWGWDCAASLH

SEQ ID NO: 36084 - protein, 65 aa, Homo sapiens
LLLCVIIFECNYSSANLPKMLDIFFFFGEEGRARGGTWEKTGVGFWFNFFFTFFSLSNLKFVASF

SEQ ID NO: 36085 - protein, 37 aa, Homo sapiens
MGVPGAIISLPGALIPCIVSLVKSEQPGRALVQTWAE

SEQ ID NO: 36086 - protein, 9 aa, Homo sapiens
LDFWMLVYF

SEQ ID NO: 36087 - protein, 27 aa, Homo sapiens
MNDSILYHQDVLRAVYGWIDCTAISCD

SEQ ID NO: 36088 - protein, 19 aa, Homo sapiens
MLIVKQHPQLFCVVSLTPP

SEQ ID NO: 36089 - protein, 95 aa, Homo sapiens
LHFYFLMQRMNKLNTCFEDRSRCSVWHHVIICLFYNIHVSLRNHGRDVRAEYTQQMLKEKEGSVLQKKKKRTNRILTLLTFPNFPMLLVNIIIVS

SEQ ID NO: 36090 - protein, 37 aa, Homo sapiens
LLEGRQMLLGFLVFVFVFFSPFIFLRGRVGSGWGGGG

SEQ ID NO: 36091 - protein, 32 aa, Homo sapiens
MSWGFGSTARRPRACTSLAVSSPSASGAFSVE

SEQ ID NO: 36092 - protein, 23 aa, Homo sapiens
MPSKGVCLFFFHPLSSNLFVTGK

SEQ ID NO: 36093 - protein, 31 aa, Homo sapiens
VFGLLAAFFPLSHTLVYYFEVVFAEFERREN

SEQ ID NO: 36094 - protein, 64 aa, Homo sapiens
MISKLGNTFPLTQWSSEYFTGHLILEMSFETQFVKPAVEQMTIYLPLSLRGFLSYMLSVIYFAF

SEQ ID NO: 36095 - protein, 106 aa, Homo sapiens
LREIFLYLLKLLRSSEALGLPWEAAPLQSPKPKSNLKRARLRSQSPRKTSGPPSDSHAVRKPMLTMCRGYMEKERDAWPAPCCFSHVSEEGTRLVSGDTNLDVQPS

SEQ ID NO: 36096 - protein, 26 aa, Homo sapiens
MVAPSFYLLAGALFQRPRWSLACTPC

SEQ ID NO: 36097 - protein, 33 aa, Homo sapiens
LRTPVGSVLFRHILAVTIFIVMDYLKPLLRVIY

SEQ ID NO: 36098 - protein, 306 aa, Homo sapiens
MMHNIIVKELIVTFFLGITVVQMLISVTGLKGVEAQNGSESEVFVENYETLVFYWPSLLCLAFLLGRFLHMFVKALRVHLGWELQVEEKSVLEVHQGEHVKQLLRIPRPQEKKKSWFQTRIYEWDPCFQFPSRMIGTIVLAFICLYLFIVIEFCVFVYVRDELDVLENNLESYITFTNHSGVLTPVILQVKELISVTKGVWVATILPAYLTCVSYLFHILVCYRKHMKRLWAGDKHFLPLKFHNPASSESMVAIARYSGWQIAYILWGYLIIHMVQSLCGMAIMYSLVLPIVQTRAWKCCKGWALG

SEQ ID NO: 36099 - protein, 316 aa, Homo sapiens
MMHNIIVKELIVTFFLGITVVQMLISVTGLKGVEAQNGSESEVFVENYETLVFYWPSLLCLAFLLGRFLHMFVKALRVHLGWELQVEEKSVLEVHQGEHVKQLLRIPRPQEKKKSWFQTRIYEWDPCFQFPSRMIGTIVLAFICLYLFIVIEFCVFVYVRDELDVLENNLESYITFTNHSGVLTPVILQVKELISVTKGVWVATILPAYLTCVSYLFHILVCYRKHMKRLWAGDKHFLPLKFHNPASSESMVAIARYSGWQIAYILWGYLIIHMVQSLCGMAIMYSLVLPIVQTRAWKCCKGWALGSLQYPSLWVS

SEQ ID NO: 36100 - protein, 13 aa, Homo sapiens
VAFSVQLLITGIW

SEQ ID NO: 36101 - protein, 34 aa, Homo sapiens
LKSKWGKRQCLINIKTHFCISWITLTILMFNYIW

SEQ ID NO: 36102 - protein, 41 aa, Homo sapiens
LRQSESLSSETLSTAEDELEAAAEPFSKPVKCELLINEWFF

SEQ ID NO: 36103 - protein, 25 aa, Homo sapiens
MSSTRPKIFFLIYLLYCANFSMYVM

SEQ ID NO: 36104 - protein, 90 aa, Homo sapiens
MLDHLTRSCEVTSLLPFLLLPSWHQSLKSQKTLPVNWRRSRSSIRLGNKSLPPLLQLLASHSQQTQAARKEKNFNFNTRSKFLQTHASDS

SEQ ID NO: 36105 - protein, 24 aa, Homo sapiens
MRLFLEIRGLRCFCFLSAEVWVLL

SEQ ID NO: 36106 - protein, 33 aa, Homo sapiens
MLLWLLMLGRSASFCSVADKLQWTLAQRTGPHP

SEQ ID NO: 36107 - protein, 36 aa, Homo sapiens
MQVAVPSRCYVAAPDPAILPQGVRAGTALPCLPGII

SEQ ID NO: 36108 - protein, 65 aa, Homo sapiens
MAGEASENLQSWQKVKGKPAHLHMMAGTLYVIEVSPKNEIVSFAKTWMELEAFILSELTQEQKAK

SEQ ID NO: 36109 - protein, 35 aa, Homo sapiens
MYVLLLLVLWVPATFMSCNAHPEGVQLHFSSQQGY

SEQ ID NO: 36110 - protein, 23 aa, Homo sapiens
MVTLIPEHFHRCYCDIYLCPPPE

SEQ ID NO: 36111 - protein, 25 aa, Homo sapiens
MPWFHYGRSRGLRDAKYCEAEVTDR

SEQ ID NO: 36112 - protein, 36 aa, Homo sapiens
MPDLHSYPMLPRHPGLPLGALASETNMPWRNAWMGK

SEQ ID NO: 36113 - protein, 14 aa, Homo sapiens
MNSKLNELQKNSSL

SEQ ID NO: 36114 - protein, 34 aa, Homo sapiens
MVFDAKQMPNFGGKSTTSLLGLDRWLILKLAQST

SEQ ID NO: 36115 - protein, 65 aa, Homo sapiens
MAQLPISWREISLSDLEVSLLPPPHMNLVLEATRAVCPSAEAGGISKSSILVSFSEDPNCAVCKK

SEQ ID NO: 36116 - protein, 104 aa, Homo sapiens
MFMAEDAMGRVRRRTATQPRSQEQPRDPSSACSPPPPLLYLLRSHLGNGRQGRSAACCPSWGQEPGGSKEHHRKEAGRLARPAPKTHRYTRCSELAGPRRPLMR

SEQ ID NO: 36117 - protein, 23 aa, Homo sapiens
MAFWLSSSVVSVLISLISDTSSI

SEQ ID NO: 36118 - protein, 14 aa, Homo sapiens
MPRAWSCPLPPAPS

SEQ ID NO: 36119 - protein, 39 aa, Homo sapiens
MEPLMAPKMRTALTLCLTSSLWVCEWWLSKEFKPSCTWQ

SEQ ID NO: 36120 - protein, 164 aa, Homo sapiens
KVEREVLGSASISVALFSPSWYSPPNLGFLHARVASCSTSLSLILVSTSSPGKFPFSRLALPTRASDFHPSFSLLASDYPPPIPPRPAAQLPPPFTRTGTIIPTPLRPVWDSTCLLPNPTLISAWSLPLWPNLSSRLIGDGHSHSLVPNTSSWMDSRHPCPLFN

SEQ ID NO: 36121 - protein, 49 aa, Homo sapiens
RLSLMGAFLLATSLKWNLLVALLPLQLWCYTEKLEVSKQTREKEKHQKV

SEQ ID NO: 36122 - protein, 15 aa, Homo sapiens
MFTDFPSAPTVAPLS

SEQ ID NO: 36123 - protein, 36 aa, Homo sapiens
VLLCLISLLLLCYMCVCHFQFFVKDTKNLGLHNTSR

SEQ ID NO: 36124 - protein, 35 aa, Homo sapiens
MGCGPAGVCWGPLVWLWFCSIPPSLSAWPSSGLSS

SEQ ID NO: 36125 - protein, 44 aa, Homo sapiens
LVSLCFGSLWPVLSRLLASRPAARPRGSSWPPRRPARARRPRAG

SEQ ID NO: 36126 - protein, 47 aa, Homo sapiens
RSLILVLNSGGGKEDDGGKEKKPFMHPSLIQYPSMRECQASGEEERV

SEQ ID NO: 36127 - protein, 72 aa, Homo sapiens
LAFRALVLLDLLGLLDLLASLVRLESEAPRGTLDQMDHRGPQDPLGNLVAREPSRVWKAVRISCVQPTVHPE

SEQ ID NO: 36128 - protein, 76 aa, Homo sapiens
TAESLHPGAARRRRAPLPPPPPPGLPGSRGPGPLHLSFPAGHKAFCCRRGDWRPSLLIPLIFQFILCLFSGQSVTL

SEQ ID NO: 36129 - protein, 24 aa, Homo sapiens
RHSLARTCLLFFLCPEILEHASSK

SEQ ID NO: 36130 - protein, 16 aa, Homo sapiens
VGTESRTALSRSGAQK

SEQ ID NO: 36131 - protein, 14 aa, Homo sapiens
MVEYRSLRVGKKIP

SEQ ID NO: 36132 - protein, 44 aa, Homo sapiens; identical to SEQ ID NO: 36125

SEQ ID NO: 36133 - protein, 40 aa, Homo sapiens
VVHLRCSKWDCFIILMAEEYFLVYVYESFLISLSVDEQLL

SEQ ID NO: 36134 - protein, 53 aa, Homo sapiens
LTLPESETEMRALGPGKRGEGERRKPENGEIKSFPWIIPSVNRDHKARASASS

SEQ ID NO: 36135 - protein, 22 aa, Homo sapiens
LPPGLEREISLLEEEALRTQGR

SEQ ID NO: 36136 - protein, 53 aa, Homo sapiens
LSLSSVSFWFSLSHSHSLPSSHILSVWVFLSLYVSLAQSLSLFIDPSLTLDLS

SEQ ID NO: 36137 - protein, 46 aa, Homo sapiens
TNILQCLRENGLIENVRGIHPFLKLEWLLFWVEKSGIRQGEQSGNG

SEQ ID NO: 36138 - protein, 73 aa, Homo sapiens
TAGYLTQNQSHWDTEKKKKGKKSEGVILACFYKNTVAIDSASVKMTQQTWRTKDSRAAPKLGKQLQQKLPSPW

SEQ ID NO: 36139 - protein, 60 aa, Homo sapiens
RKENSAGAPLASPRVTTMFSQIEDRSPAPLRSAEGCREHPHPFGHPCPGRARPSLSGLDP

SEQ ID NO: 36140 - protein, 116 aa, Homo sapiens
LEAPRLAHSARPSAGAGALAATLLIWGQSRNPVTRLRPNPRPRPPAAAKASSPAPGARATPVARAFQSRLQQKLSITSNWVVERIHLRRLLLLQGLSSLHSMANSSAAAEALLEAS

SEQ ID NO: 36141 - protein, 54 aa, Homo sapiens
MTTDSAPRPQAEDREERTRESSHAPAPRLRREGASSDRPGCKLNTSLRRRLISG

SEQ ID NO: 36142 - protein, 45 aa, Homo sapiens
LLHLTPWDDSHLLESLYYLGFRRVNPLDYHMKLLPVSSPGMASHL

SEQ ID NO: 36143 - protein, 47 aa, Homo sapiens
KVLSWKQRLCPHQMLNLLSTLIFHFTFIRTTAVIAPAILCRNDLKTD

SEQ ID NO: 36144 - protein, 91 aa, Homo sapiens
RSSQKKMLSLFPQLSLCAVAPFSSSNSRTLMISQNRSTSFFASGKNRFQLSPTNFASWLDISARLAGVILQKSSNSSGKIKCSLNHSSVLM

SEQ ID NO: 36145 - protein, 21 aa, Homo sapiens
MHTSGRGWGTTCLLVLLASDE

SEQ ID NO: 36146 - protein, 51 aa, Homo sapiens
KTPAGCRSMKTSSRRKSKSFMTSTLLAPKSGSMHTHKCIFLFFLPFECIGV

SEQ ID NO: 36147 - protein, 5 aa, Homo sapiens
MCPCA

SEQ ID NO: 36148 - protein, 10 aa, Homo sapiens
MSGPATWDRK

SEQ ID NO: 36149 - protein, 5 aa, Homo sapiens
MDADL

SEQ ID NO: 36150 - protein, 17 aa, Homo sapiens
TLADHTLPYRPQLPGAL

SEQ ID NO: 36151 - protein, 51 aa, Homo sapiens
LEMKHVERLCRGREAELKEHGRRPRPLGSRARSPPCAGLARAWNSGGPGAK

SEQ ID NO: 36152 - protein, 75 aa, Homo sapiens
RGPNKKREEMEITSPDLAFLSLFLFSPLPSDDWRVKGNPERGGEQRFEKMQECVWRRVKLPFKLWPPGTRCSAAG

SEQ ID NO: 36153 - protein, 10 aa, Homo sapiens
LGGTLSRPLR

SEQ ID NO: 36154 - protein, 80 aa, Homo sapiens
LLQTSTPRPQEGEVARQVADRVRLPPCRGSRRNETLLPLALCPSLSSCLASYSLPCVPRLPHILARPSTSGQGRRWPSRS

SEQ ID NO: 36155 - protein, 42 aa, Homo sapiens
LAVALVSTHLPATLVIVATAGLDCQTGFSFYLEAFSEGSRSI

SEQ ID NO: 36156 - protein, 82 aa, Homo sapiens
LENLCPCIVSPWAPTAASSAPVPPGSPCWCLVFFSLSCPCVEGSKLRVSSPIPSLLLTAGLDVVYCGLFYFLHFVLKLKYAK

SEQ ID NO: 36157 - protein, 65 aa, Homo sapiens
IPSWKGRCIAIYRSRRMDLLNDLALFSGPIYHIPFLLQIFLLSPFLWDLSCYIPSELTNAFTFFP

SEQ ID NO: 36158 - protein, 26 aa, Homo sapiens
RALTEDCLAGGTVLVLSSQAQQALPS

SEQ ID NO: 36159 - protein, 46 aa, Homo sapiens
KKRNQKRMFVKFWLESRAGSVKKVLASPSPSAMILSFLTPPSRASC

SEQ ID NO: 36160 - protein, 82 aa, Homo sapiens
ISLGPSLLLFLSLDARLLRTPSPGGPAACELTEGLRLGEWVSPRPCPCSRPWPGPWLSPLCAEIVSLCGYSGVETAGSVTAS

SEQ ID NO: 36161 - protein, 49 aa, Homo sapiens
ISLGPSLLLFLSLDARLLRTPSPGGPAALLPTLTSRRPWPPSQTGSYSC

SEQ ID NO: 36162 - protein, 42 aa, Homo sapiens
TLLPLPPLPSPLLFRLRLFLSPAAPAPSLGPGGGLGSLQSSP

SEQ ID NO: 36163 - protein, 58 aa, Homo sapiens
LVHLQHHFCTYKIMDQILESNKFTKGFALLSWLGCSGMNMAHCSLDLLYSSNPPSSVS

SEQ ID NO: 36164 - protein, 33 aa, Homo sapiens
ILLTHTMSFVWTIRQKGWLVKVAVVWKFLPALL

SEQ ID NO: 36165 - protein, 18 aa, Homo sapiens
IHQNHSWDISHGSDSCTQ

SEQ ID NO: 36166 - protein, 45 aa, Homo sapiens
RKKQASDLIFHSSFLCLVLTVFVYFKGEKTRGTKPAGSIHHRGWF

SEQ ID NO: 36167 - protein, 104 aa, Homo sapiens
IKRFSCSHCWQMIEPGFESRQPGSRPCALNSRFASRTESYERLAQCLVLSRHSDSSIKEHCVHAEVHSTWSETACVRFLIPFITGCVISNKKTEEPAGRGSSRL

SEQ ID NO: 36168 - protein, 75 aa, Homo sapiens
LTSTDLYLWSFLYCSRDTVFFLCSSNPMGNITEVKCNSHHVISRAHTNKQHDLLLNIELDHLAEVVFARFLCKGE

SEQ ID NO: 36169 - protein, 69 aa, Homo sapiens
MQMPPRSSNSGPQRVINCCSLDPRVLTAQNSKEETRSRAPSSSSPGWMRPAPDCFRLSRLLKLRADKRH

SEQ ID NO: 36170 - protein, 70 aa, Homo sapiens
LAAGPAAAAAAAAEGMSPGRARRLPQATARRGTPSRAHRSTARTPAPCGTRLRSLEAVSVIRMHWAPRSW

SEQ ID NO: 36171 - protein, 10 aa, Homo sapiens
ITILLLLQWR

SEQ ID NO: 36172 - protein, 25 aa, Homo sapiens
IPLILQRNTAVRCASFQQERFLHLL

SEQ ID NO: 36173 - protein, 39 aa, Homo sapiens
VYLSCSVLRGAQRTSLPEDRFFVTGSSNLAVDTLVACIG

SEQ ID NO: 36174 - protein, 11 aa, Homo sapiens
LLAPRPQRRGN

SEQ ID NO: 36175 - protein, 14 aa, Homo sapiens
ITGGMENAVAVKGR

SEQ ID NO: 36176 - protein, 24 aa, Homo sapiens
TRARGVGDLELENPPARVVVVDGE

SEQ ID NO: 36177 - protein, 39 aa, Homo sapiens
RIRVSSGKTLAGLVGCAAPRTASHQPAPSLSCSTLICTP

SEQ ID NO: 36178 - protein, 197 aa, Homo sapiens
MLSHGDLVLQLCGLLWPGHGPAEVWAQPIPGAGPVWNHQHPGHAGGHRHHDLRGPPCHGGLLPHPGRAHGDRQHVCARRHADPVHSPGSAGQRLPGQLLHLCVPVYRRAVPHGDQADGDGLCLCPRPPRGPDGAPGYHTWGIQHHPATRELWGHRNPGWAGRLRPDRDPQHAPGGDHRSHGEEGQRRLFQETCRREE

SEQ ID NO: 36179 - protein, 9 aa, Homo sapiens
MTFLLFAFG

SEQ ID NO: 36180 - protein, 27 aa, Homo sapiens
LSFKTIGTNLPLLKLKMVSSVPGFVKA

SEQ ID NO: 36181 - protein, 88 aa, Homo sapiens
LAQVNSTSRRRPRPRVCILGWTSWGFGPSPVGGSRSAAWAQPTPRRRPWQAPWTWTRAARWRSCSAGASKPSMTPGRCGTRSWCACSS

SEQ ID NO: 36182 - protein, 18 aa, Homo sapiens
LATLLLRLLLSLGTGCQR

SEQ ID NO: 36183 - protein, 40 aa, Homo sapiens
MWMFPFLKWKVTSRAQKLTSRAQKWTLTHLMLMFMAQTGT

SEQ ID NO: 36184 - protein, 15 aa, Homo sapiens
ILMHLMWMFMVQTGI

SEQ ID NO: 36185 - protein, 86 aa, Homo sapiens
TATLLCLLSATALLCSLGHPRPHLLRLPDLPSFPAFLWIPASGHPSPPSLQGPLLVSLLLEPLPPPPSLQNFSFTPHPPPLPPFLF

SEQ ID NO: 36186 - protein, 53 aa, Homo sapiens
LPLRAPLSLGPFRTLFAHKLPKKKEPTCWYCWLVSLWSTSLLLLCYLLAPLPM

SEQ ID NO: 36187 - protein, 52 aa, Homo sapiens
LGPFRTLFAHKLPKKKEPTCWYCWLVSLWSTSLLLLCYLLAPLPMSGWFPIR

SEQ ID NO: 36188 - protein, 32 aa, Homo sapiens
IFSFACIIRVSTPLLSFLATLLQSSTNYPCPG

SEQ ID NO: 36189 - protein, 47 aa, Homo sapiens
MSWWTEASGATCTTALTTVRSASSAPTTIWYVFTSSPACTPITSRPS

SEQ ID NO: 36190 - protein, 52 aa, Homo sapiens
LSSCWMSFTQKINSTWFLNFCTKISRNSWMPLLSLAFLFPSSRAICSSCSRA

SEQ ID NO: 36191 - protein, 16 aa, Homo sapiens
LAGFSADLKTALLIAL

SEQ ID NO: 36192 - protein, 23 aa, Homo sapiens
LELELELRIRSPGSLCHLASSAN

SEQ ID NO: 36193 - protein, 64 aa, Homo sapiens
MSFTYIWWTQQGRMSTAFCPIHSSLGSMVMCLCILSPLCIASKSLRVCTKSYMKAMGKPGCQWF

SEQ ID NO: 36194 - protein, 21 aa, Homo sapiens
MGFMATGWAWLETLALGLCLL

SEQ ID NO: 36195 - protein, 85 aa, Homo sapiens
MSTSLARSSTAVMAAGPTAAAAPMSTVSPAACSPTSNFSWSASSTGQPWHSRTSSWQSKITLSCAWPNAGPHLRACSMRTPTGTP

SEQ ID NO: 36196 - protein, 33 aa, Homo sapiens
TRPRTRRPGHAPAKMAGAGAQLSVAAAAALPRS

SEQ ID NO: 36197 - protein, 19 aa, Homo sapiens
LPTDFVQLQISNLSPLSLL

SEQ ID NO: 36198 - protein, 52 aa, Homo sapiens
KSMTSRWRSRICGWRTMGVTAVRSLTGWRMKAVWWSWSCGDGAVCPHISPTC

SEQ ID NO: 36199 - protein, 28 aa, Homo sapiens
RGPTCLPWLSMSLATPWAWATPQPPTPL

SEQ ID NO: 36200 - protein, 47 aa, Homo sapiens
LVASLWFLSGACNPWFTSFQVLAPSSHGSQSPSVNSLDLMSWVQLGH

SEQ ID NO: 36201 - protein, 24 aa, Homo sapiens
IRIWRERGWSLLLPLCSLFRGLWW

SEQ ID NO: 36202 - protein, 50 aa, Homo sapiens
ILFFSHLLAFFFLPPWLPSPNPAIPSSTPVLPSPAILSHPTCNLLSFAPP

SEQ ID NO: 36203 - protein, 39 aa, Homo sapiens
LLTSQWGMLFTLQLTLGLPGALSLGCLMRDVQGFSWVGV

SEQ ID NO: 36204 - protein, 31 aa, Homo sapiens
MIAWLTAGLVSVCCCTLWRFSLELLPEKAPL

SEQ ID NO: 36205 - protein, 12 aa, Homo sapiens
MALAVLILSSLP

SEQ ID NO: 36206 - protein, 56 aa, Homo sapiens
MPSCCCCWWPSSWALRSPSHPPCRALPPSAQAWSSSQARVASPTPSCTTATTVTPR

SEQ ID NO: 36207 - protein, 97 aa, Homo sapiens
MVSFCVSCLTTCYPMPSTCVRSTCAPRCPSSCALRTLEPSCPPAVRSSASSGASSSKPLTSSMCRILARSSTPCLLCPGPRSPRTGGSCPSPPRRRV

SEQ ID NO: 36208 - protein, 54 aa, Homo sapiens
IRSMAAYSLLLFLLQIKDRHNGNIMLDKKGHIIHIGQPATAPPSSPFTPAPRGG

SEQ ID NO: 36209 - protein, 38 aa, Homo sapiens
MPWRILSASRLLAAGPPAPTSRALERESSCLLRLYYAW

SEQ ID NO: 36210 - protein, 13 aa, Homo sapiens
ISCIGLIIFNYMA

SEQ ID NO: 36211 - protein, 44 aa, Homo sapiens
LESESQRHGLVRVLCKMSGRGPLCFPGGHWIVFLWGGTVLWLWT

SEQ ID NO: 36212 - protein, 67 aa, Homo sapiens
VLFAARRFRRVAFVLRAPVGFGVSALKTATRAPMQLAPCRMGHGILNMRQIADQLPWVLLMTQESFA

SEQ ID NO: 36213 - protein, 19 aa, Homo sapiens
IQKADFRQTLSAFLMGFAS

SEQ ID NO: 36214 - protein, 173 aa, Homo sapiens
MQSSCRASPSLESSQKMPFHLLKPLMVAAATGNLALIPQSAGAMALRYSCTQRLEPSLRLIAGSWLPLRALASTHSALLGPASSSSSAWTPRLESAAQCLCNGTGAGTIWSSVSTRLPAPGPSSWDRLWWLRPAPRWTPSGPALMWPSLFSLKPTRCEVGLLASCGNTAPSPG

SEQ ID NO: 36215 - protein, 50 aa, Homo sapiens
MGVKEDIKQASRVEPATPGWWGRGTRPGRGKPLGQWSLVKQSCQPSMDPN

SEQ ID NO: 36216 - protein, 204 aa, Homo sapiens
MRCSLQSGAWLNGLTRKRDFRVRPLLYQDSILGVKQDNAEGSVQQPCKGFSSALGRWAVPLPGPPGPPGPPLPEGKHEQPLTWEWRLLRGNCLYTSNVALWDLSGAPTHAGRVFMAFPGQSDTKMQWPEVPALPLLSSLCMAMVRKSSALGKEVGRRVKEMVMLVAPFRQSSSLSRTFSSRKVVKAHASLHGARLSPLSRNIRG

SEQ ID NO: 36217 - protein, 66 aa, Homo sapiens
MVCNSDFAHRSTVPPSAHPFTLTPTLSLNTFIIVRRGRWDFGRSAAATASGGLIFIFALRWLKAFI

SEQ ID NO: 36218 - protein, 63 aa, Homo sapiens
MPLDNFCLLKRRGLSPHRPMVWRLNQLSDYYSRVRLMTLQEPGRSKRNLRELRTQSLMMRKKC

SEQ ID NO: 36219 - protein, 42 aa, Homo sapiens
MDVPPGRMKAERVASPPQGCSLIFLFSLASQHSAFCIHHGVW

SEQ ID NO: 36220 - protein, 18 aa, Homo sapiens
MEALLGFHIWKTANSRSM

SEQ ID NO: 36221 - protein, 67 aa, Homo sapiens
MVSHRKDWRRVNLRFSSCLLLSICLDDKPSADELCFWTDHGRSQLTCPSLGVSQGYVTTKTLIHPFF

SEQ ID NO: 36222 - protein, 67 aa, Homo sapiens
MVSHRKDWRRVNLRFSSCLLLSICLDDKPSADELCFWTDHGRSQLTCPSLGVSQGCTDEETETENPE

SEQ ID NO: 36223 - protein, 120 aa, Homo sapiens
MVSHRKDWRRVNLRFSSCLLLSICLDDKPSADELCFWTDHGRSQLTCPSLGVSQGSLTLSSRLECSGTISAHCKLCLPGSRHSPASVSQVAALMRKLKQKIQSKFHQATQQGLIEPGETL

SEQ ID NO: 36224 - protein, 55 aa, Homo sapiens
MGGTPPLYRLLLLCRPCRARLLCPPRAHCRDPAGWCLPMWPMPSMREWPGTSLDF

SEQ ID NO: 36225 - protein, 28 aa, Homo sapiens
MILRLFLSHVLQHRIGDFRKSFSHCDSI

SEQ ID NO: 36226 - protein, 58 aa, Homo sapiens
RVNLRFSSCLLLSICLDDKPSADELCFWTDHGRSQLTCPSLGVSQGCTDEETETENPE

SEQ ID NO: 36227 - protein, 52 aa, Homo sapiens
IWLVPVFLLPAKLGFRPSADSVPHVLGALDIPGSGAYEALWPKVPEVLLVPI

SEQ ID NO: 36228 - protein, 41 aa, Homo sapiens
LCDWDFMDLASPARCVSNSWEYCSMIIELVSIVCFLFVALS

SEQ ID NO: 36229 - protein, 117 aa, Homo sapiens
LMAAAASPSPDPAGRRVSRPKPAGPGRNPRRAAWTQRLWVAAGVACREAWRPLERRAAEGVRAWRAREGGLGTQAGSAASSGHGAARSGSRVTTLSPLGETYLVLTTTDKGLNGPGR

SEQ ID NO: 36230 - protein, 39 aa, Homo sapiens
MLFPAKRWRSPISAVRAPAMRTTSGSSLMLASTSLWNTP

SEQ ID NO: 36231 - protein, 19 aa, Homo sapiens
KTVYLLLLMIVRTTSFLLL

SEQ ID NO: 36232 - protein, 29 aa, Homo sapiens
RLGCRLSAAALGWCAVVRPRLTAASATQM

SEQ ID NO: 36233 - protein, 25 aa, Homo sapiens
TARRPRACTSLAVSSPSASGAFSVE

SEQ ID NO: 36234 - protein, 11 aa, Homo sapiens
IPFPQPGTEPT

SEQ ID NO: 36235 - protein, 35 aa, Homo sapiens
LNFCTKISRNSWMPLLSLAFLFPSSRAICSSCSRA

SEQ ID NO: 36236 - protein, 14 aa, Homo sapiens
VCLPGCCAAGCECL

SEQ ID NO: 36237 - protein, 34 aa, Homo sapiens
IGRRNLSAFKTWSVCLVETLLLLTNRTVPARSTS

SEQ ID NO: 36238 - protein, 18 aa, Homo sapiens
IISPRRDFLLIACLIAQV

SEQ ID NO: 36239 - protein, 10 aa, Homo sapiens
KWRMTWVLAC

SEQ ID NO: 36240 - protein, 11 aa, Homo sapiens
RSVIQWLLSLA

SEQ ID NO: 36241 - protein, 30 aa, Homo sapiens
IWCVCVCVCVCLGWVYDVSAEHAEVLAGVS

SEQ ID NO: 36242 - protein, 24 aa, Homo sapiens
IPDTVAFGNNKNCSWAWWYTPVDP

SEQ ID NO: 36243 - protein, 12 aa, Homo sapiens
LLAGRWSLILLS

SEQ ID NO: 36244 - protein, 30 aa, Homo sapiens
MARMSGRSAVGVFTCSKGTVAPARPSSSTA

SEQ ID NO: 36245 - protein, 21 aa, Homo sapiens
MGGGGHGLSLYAVWKVESSSS

SEQ ID NO: 36246 - protein, 51 aa, Homo sapiens
RLGLGFLQLAPALPAPAAHPPRGRCRNRVTITAWWCSGRAAWARARWCCAS

SEQ ID NO: 36247 - protein, 70 aa, Homo sapiens
IGGRCQAWRPPGALAWCLWLVPWASLWSCSLEAVQQKSPPGLSKNPRTRSACRGVWPLSCVRPRVTPSHE

SEQ ID NO: 36248 - protein, 77 aa, Homo sapiens
IEIGEEEEEEEEEKKEEVEEEVEEEEEEGKRRRKKKKKKKPTTFPGLPFFFPYLYARVCLWRVCAPRPFHPNPGLDV

SEQ ID NO: 36249 - protein, 91 aa, Homo sapiens
MLRYRGSGSLLCGPFLQSDFALLSSPHSPLHLPHQKREVGATTALSAQAPVSCFRVRGKEDPAKAATTIFPWGHGLGRQPGVQPPVVARAR

SEQ ID NO: 36250 - protein, 32 aa, Homo sapiens
LHQLTLYPLSFFVSLLSPFSLLCLCLSPDFCI

SEQ ID NO: 36251 - protein, 11 aa, Homo sapiens
ILSAILGLCVS

SEQ ID NO: 36252 - protein, 18 aa, Homo sapiens
IHLFLVAISFQFILKISH

SEQ ID NO: 36253 - protein, 12 aa, Homo sapiens
TAVLVLNLRLCL

SEQ ID NO: 36254 - protein, 55 aa, Homo sapiens
LPTLVTYCSAGLFPLGSLALFLPQHDFYRDAVVEASRRSPAPVEKIPLVTPTLPP

SEQ ID NO: 36255 - protein, 36 aa, Homo sapiens
RCWGLRLSLSLFSAPPGIPLLTWVFYTPAWLPARPP

SEQ ID NO: 36256 - protein, 41 aa, Homo sapiens
TLAAQHRGARIGRFVYRLLLLRKLVSVKVILAQMSNKYAPS

SEQ ID NO: 36257 - protein, 15 aa, Homo sapiens
MPMRASFLLLISIIS

SEQ ID NO: 36258 - protein, 17 aa, Homo sapiens
KRGTLLMGICTAMVLGE

SEQ ID NO: 36259 - protein, 22 aa, Homo sapiens
KSYSHDCWWLLVRLWLDCSFFL

SEQ ID NO: 36260 - protein, 50 aa, Homo sapiens
LAALLSFLGLSLPPGLPQIHDVQFSGAGAGCAGHYLPQVLLPRGRQVQAE

SEQ ID NO: 36261 - protein, 45 aa, Homo sapiens
MTKCRRLTSISTTCASLMRPSWRSLSGSARRWRKGLEPPLTLLQQ

SEQ ID NO: 36262 - protein, 18 aa, Homo sapiens
LDWQTQVQWLLCFGLMLN

SEQ ID NO: 36263 - protein, 32 aa, Homo sapiens
MASLFSCLFQSILMREGSAMLFLQTRMLMAFM

SEQ ID NO: 36264 - protein, 40 aa, Homo sapiens
LMTVVTALLLIILQTRGCSQFGKAVGPAASAGTLDLSGWR

SEQ ID NO: 36265 - protein, 72 aa, Homo sapiens
IEVTGELAGLGARSRLSAFAAAEWPVRGSPRRGSVVPRRRLPPSALISGAGTAFHSAPVVRSLRLPFRIFRL

SEQ ID NO: 36266 - protein, 26 aa, Homo sapiens
RIKVIGSFTIFFIRLCLSLNTEFCRY

SEQ ID NO: 36267 - protein, 41 aa, Homo sapiens
LGRKFWDLSISAFPVLSGQMAVANPMLLILCFLCLAIEHKK

SEQ ID NO: 36268 - protein, 26 aa, Homo sapiens
MRRHSEKAQSMNQNVDCHHLLNLLSP

SEQ ID NO: 36269 - protein, 37 aa, Homo sapiens
LSCRLVAMSRLLVLTMEKSASTTIVPMIGSLPLGSSH

SEQ ID NO: 36270 - protein, 16 aa, Homo sapiens
IILLGCVVMAQMIVVL

SEQ ID NO: 36271 - protein, 29 aa, Homo sapiens
ISKRVSFPTCLLGLRLSHAASFTGELETA

SEQ ID NO: 36272 - protein, 31 aa, Homo sapiens
MIIREHKLLQKLSQRFGRPLLLLVLITIQLM

SEQ ID NO: 36273 - protein, 58 aa, Homo sapiens
LRWPWPWGDRLMKSFETCLCLAMWDLTASLTSWSTSLLLKDSVSTSFVLVRQALANPR

SEQ ID NO: 36274 - protein, 32 aa, Homo sapiens
MIFCLLTILVSFPCGPVWLAWFLSLGLVIKYI

SEQ ID NO: 36275 - protein, 60 aa, Homo sapiens
IISGSLHFICLMEILSDIQQPCKWSGLCQTATNSCRTISEAAYPRSLMWKDMAVTAWGSK

SEQ ID NO: 36276 - protein, 12 aa, Homo sapiens
MGKHFLPLTAST

SEQ ID NO: 36277 - protein, 51 aa, Homo sapiens
ISRVFLTSSVCYSRRSRRRSKKEEKKRIIYSTYFGCLSRFSFFLFLAIIFF

SEQ ID NO: 36278 - protein, 37 aa, Homo sapiens
VILHRGLCIFMIIGSKMLIQELKIGSSCPRLCHKPSS

SEQ ID NO: 36279 - protein, 10 aa, Homo sapiens
LVCVRPWPCG

SEQ ID NO: 36280 - protein, 22 aa, Homo sapiens
MNFSSQGWACLLTLGIVGRALV

SEQ ID NO: 36281 - protein, 19 aa, Homo sapiens
MKHMYKLWRASTQILTLMM

SEQ ID NO: 36282 - protein, 34 aa, Homo sapiens
MKRTRLFSSSSTSPSQQTWAYSLSYILCSKMYML

SEQ ID NO: 36283 - protein, 90 aa, Homo sapiens
IAAAATTSSSLSSFLLRLAALFSAAEERSAMSGKFREGLHGAMLPGLFRGRPRAALRLRQKDSCGRWNSLSIFQNVFPSPSMGPDTAVLC

SEQ ID NO: 36284 - protein, 16 aa, Homo sapiens
MFLSFLMNQILILAFL

SEQ ID NO: 36285 - protein, 30 aa, Homo sapiens
VIALVLKIVIFFTALMHIDLKDSKKQNVHQ

SEQ ID NO: 36286 - protein, 25 aa, Homo sapiens
VIALVLKIVIFFTDLKDSKKQNVHQ

SEQ ID NO: 36287 - protein, 33 aa, Homo sapiens
IRGGGWAALLCALRLTALLSPVSFVAGSFCAGA

SEQ ID NO: 36288 - protein, 10 aa, Homo sapiens
VALSVLSVLT

SEQ ID NO: 36289 - protein, 36 aa, Homo sapiens
LCLCILKARRRGEQNQLDPSITVGGFNFSFFLVIFF

SEQ ID NO: 36290 - protein, 36 aa, Homo sapiens
LFLNHGRRVDAAAFGVVLPLGPSARLLGRELTSAFL

SEQ ID NO: 36291 - protein, 28 aa, Homo sapiens
MLSSSSLSSSSAVVGTSGESTPGTLLHW

SEQ ID NO: 36292 - protein, 30 aa, Homo sapiens
MLSSSSLSSSSAVVGTSGESTPGTLLHCRS

SEQ ID NO: 36293 - protein, 14 aa, Homo sapiens
LIVLMLVLIRFLEY

SEQ ID NO: 36294 - protein, 15 aa, Homo sapiens
TSLCLWLWGTWVCWW

SEQ ID NO: 36295 - protein, 19 aa, Homo sapiens
ISTFMAALFTIVKIWKQPK

SEQ ID NO: 36296 - protein, 11 aa, Homo sapiens
IKLRARLLALT

SEQ ID NO: 36297 - protein, 61 aa, Homo sapiens
VQWPSVRMPRAAATAAAAAPAAVARVRAAAAPGPGERQSMEDTRMGGKADSQELHSSRGLW

SEQ ID NO: 36298 - protein, 12 aa, Homo sapiens
LRSLVFLIIIGN

SEQ ID NO: 36299 - protein, 28 aa, Homo sapiens
MPACPPSLCPPPLQLLALSASSPAGATL

SEQ ID NO: 36300 - protein, 50 aa, Homo sapiens
IFFTLELLLLLLLLLLGLSLISERASKRARGEKGRECPPSTLRSWARSHS

SEQ ID NO: 36301 - protein, 10 aa, Homo sapiens
TDSITRNLRP

SEQ ID NO: 36302 - protein, 20 aa, Homo sapiens
MPVTRFLFINVVIVQVLTLQ

SEQ ID NO: 36303 - protein, 13 aa, Homo sapiens
LCIMIVMILFMEV

SEQ ID NO: 36304 - protein, 15 aa, Homo sapiens
IRTLVIAKLFVARCI

SEQ ID NO: 36305 - protein, 17 aa, Homo sapiens
MGYSLHKRVVIIVFVDA

SEQ ID NO: 36306 - protein, 31 aa, Homo sapiens
IPVGCDLLLLAMVVRPPQLCGTVSPVNLFLL

SEQ ID NO: 36307 - protein, 8 aa, Homo sapiens
MFLMSIII

SEQ ID NO: 36308 - protein, 14 aa, Homo sapiens
TVVRLGTMGEQLCS

SEQ ID NO: 36309 - protein, 17 aa, Homo sapiens
IASFYILRPFFLLDIIL

SEQ ID NO: 36310 - protein, 22 aa, Homo sapiens
MARALLVRCFFSLAYSSQLFGL

SEQ ID NO: 36311 - protein, 16 aa, Homo sapiens
TFTCPCLTTLTAMMWL

SEQ ID NO: 36312 - protein, 42 aa, Homo sapiens
LLAPPPAGESKKMTGTVCWHLVWWFSSCFRIQSLWMMTASKW

SEQ ID NO: 36313 - protein, 15 aa, Homo sapiens
VISASPFATYLLLVS

SEQ ID NO: 36314 - protein, 74 aa, Homo sapiens
LRVCPVLPSERSLCLRSLTILILSSCWMSFTQKINSTWFLNFCTKISRNSWMPLLSLAFLFPSSRAICSSCSRA

SEQ ID NO: 36315 - protein, 36 aa, Homo sapiens
IGVLFVTLRELLYVVQTPCSWHCSFLWRRTTNRCSC

SEQ ID NO: 36316 - protein, 87 aa, Homo sapiens
MRMLMGNLLVLTGLRQQIIKAKKKFIQQRDFSLPLVKDHVTWASLVTKNTASAVMIFSPCLTARVRPWLLEHPMSLWSALDFLLVLV

SEQ ID NO: 36317 - protein, 101 aa, Homo sapiens
LGSFSWFCLFYFSRGAEFRNKNICPSEFQPEGGVLSRRIYSMRWRPASRERTHMGQEPQMTPPTMVVKMLATHRCWEFFLPLKPQNDFRLPGLTRSTSKYL

SEQ ID NO: 36318 - protein, 35 aa, Homo sapiens
LQPRELSRAKLGVAVWMASSEVGTCLSFPAPEMGL

SEQ ID NO: 36319 - protein, 15 aa, Homo sapiens
MLLVRHCCLFLWILI

SEQ ID NO: 36320 - protein, 18 aa, Homo sapiens
MWSLMGMVLKLLLDLVIF

SEQ ID NO: 36321 - protein, 64 aa, Homo sapiens
IQLFSFILLRATDSTEMETIRRLSIHLNKYLALTPPRRNSLMLWLIPWSMTSFMAKMVFFLHMV

SEQ ID NO: 36322 - protein, 19 aa, Homo sapiens
LRSAWRWPVPGWWAAVVLS

SEQ ID NO: 36323 - protein, 36 aa, Homo sapiens
RYRMRRKTRNLAFLWAITWASPSQLTTRSKLENEIP

SEQ ID NO: 36324 - protein, 26 aa, Homo sapiens
MMLKRKHVFSSSCIFMWSCSLPNVED

SEQ ID NO: 36325 - protein, 57 aa, Homo sapiens
IAYPLQSAEDGVATRLQIREESASCLAAEYWSQEPAMRLYSQRMSVPRTSSCHQFGF

SEQ ID NO: 36326 - protein, 16 aa, Homo sapiens
RLFKKYFLIILLLYQI

SEQ ID NO: 36327 - protein, 64 aa, Homo sapiens
LDSCSLRRRAGDGVVPREGAKGDVPAASSRPSPERLQEHAPSPGAGRRAARESCSARTQRQGAA

SEQ ID NO: 36328 - protein, 28 aa, Homo sapiens
MEKIIHVSPFSLICLSLKCKAWTKILLH

SEQ ID NO: 36329 - protein, 12 aa, Homo sapiens
LVLPSQVSANAT

SEQ ID NO: 36330 - protein, 163 aa, Homo sapiens
MWLVFHRPHPRPSWPLRAALGFGRRQSSLRCFPVLPSARPYVSANPTLRGGRLRQDPESETGVGDLPDPVTTLVLLHNRLPLAVTVGCLPSRCPTEKRAPPWQGLLHCLAVDVEVGQESEEKTERREVEPTSEKRGGKFRWEVDGSEEFEQTPTVKESDLSKQ

SEQ ID NO: 36331 - protein, 18 aa, Homo sapiens
IKNRGGCLLLLVLVRRQM

SEQ ID NO: 36332 - protein, 22 aa, Homo sapiens
IALFSALPLALSDGNGEARSSL

SEQ ID NO: 36333 - protein, 50 aa, Homo sapiens
MASLKLMLSAGPFVGWVSQMIPFSDWPRPMASSQRTFDWRESQMWNICHK

SEQ ID NO: 36334 - protein, 41 aa, Homo sapiens
KAAMTWARNPSTRKPPPMSSTREACLWALAWTLAGREARGF

SEQ ID NO: 36335 - protein, 18 aa, Homo sapiens
LDWDRRTHILATCLWLMC

SEQ ID NO: 36336 - protein, 157 aa, Homo sapiens
MPFHLLKPLMVAAATGNLALIPQSAGAMALRYSCTQRLEPSLRLIAGSWLPLRALASTHSALLGPASSSSSAWTPRLESAAQCLCNGTGAGTIWSSVSTRLPAPGPSSWDRLWWLRPAPRWTPSGPALMWPSLFSLKPTRCEVGLLASCGNTAPSPG

SEQ ID NO: 36337 - protein, 14 aa, Homo sapiens
ILSSSCRKILLLLL

SEQ ID NO: 36338 - protein, 18 aa, Homo sapiens
IWICAALLVTRKTLVRTL

SEQ ID NO: 36339 - protein, 12 aa, Homo sapiens
IFPLLELLAFSF

SEQ ID NO: 36340 - protein, 29 aa, Homo sapiens
MTMMMIMMMTTTTMMLVTRKHKRALVHQC

SEQ ID NO: 36341 - protein, 53 aa, Homo sapiens
MFPTVTLLSPGPSTARSSPPWVLTLCLSSTANLLTGKPGDSLRWPKRATVSLC

SEQ ID NO: 36342 - protein, 137 aa, Homo sapiens
MSVPSGGAGAVLRAPACAPRAGLGLFQDAHVRTETPDRGSSRLERPAVSRPARPGFTVFHHLRLSCDRPQLCRRGRRYLLLQLPEPLPGLVQDHGLVAQGCLVCELQLHALQERRNFLFSGNPTTQLVSHWCCLPIP

SEQ ID NO: 36343 - protein, 64 aa, Homo sapiens
TLLMEMWSGISSGCILLGSPQSSLACASVSSVAVAVSSWGLHRRIALLSLLQCCGRSQRLCRRN

SEQ ID NO: 36344 - protein, 31 aa, Homo sapiens
VAVMRHSDKGQEGDLLGGHAVMEARRNEGLQ

SEQ ID NO: 36345 - protein, 22 aa, Homo sapiens
ITPLFGLNLAWLLVLRTLERWC

SEQ ID NO: 36346 - protein, 28 aa, Homo sapiens
KMAAAVAAAAAAALGARSRDRRREKQNL

SEQ ID NO: 36347 - protein, 15 aa, Homo sapiens
ITLRLLLVSIHMNWL

SEQ ID NO: 36348 - protein, 32 aa, Homo sapiens
ISFCLRLGLLFLFADETGFHHVGQAGLQFLTS

SEQ ID NO: 36349 - protein, 15 aa, Homo sapiens
LFSVYWLFWAAGRKS

SEQ ID NO: 36350 - protein, 52 aa, Homo sapiens
MRRCRKLVLAYIPVSLCSITAVTPTVRLCSMGPTSYCEQSETSRWERRMLIC

SEQ ID NO: 36351 - protein, 8 aa, Homo sapiens
IAYFGILI

SEQ ID NO: 36352 - protein, 15 aa, Homo sapiens
MVAVRLLLLFASGLR

SEQ ID NO: 36353 - protein, 26 aa, Homo sapiens
RTWSLEEYLVCFSSCLACLCSSSCCC

SEQ ID NO: 36354 - protein, 43 aa, Homo sapiens
MMDVPPGRMKAERVASPPQGCSLIFLFSLASQHSAFCIHHGVW

SEQ ID NO: 36355 - protein, 11 aa, Homo sapiens
VAKWMVCLFAV

SEQ ID NO: 36356 - protein, 24 aa, Homo sapiens
MTRSNGFCDAVWTLLSLNSMCVLL

SEQ ID NO: 36357 - protein, 23 aa, Homo sapiens
LKLTLKMILTLMYILEKQRLLLF

SEQ ID NO: 36358 - protein, 51 aa, Homo sapiens
IAKISPLLLKPRLFILPPAWAAGCSSGWAWSQEQGECAPGPPSRVPGPWCG

SEQ ID NO: 36359 - protein, 13 aa, Homo sapiens
MPHFCLLLATLLD

SEQ ID NO: 36360 - protein, 11 aa, Homo sapiens
MRILATIMFLI

SEQ ID NO: 36361 - protein, 19 aa, Homo sapiens
LWMIMLDLLSWIPKARLLL

SEQ ID NO: 36362 - protein, 38 aa, Homo sapiens
RDALKIFIEFTATMALILPLMLMRWLSSSTTSKAKLLK

SEQ ID NO: 36363 - protein, 11 aa, Homo sapiens
IKPTIQMFLLF

SEQ ID NO: 36364 - protein, 13 aa, Homo sapiens
IWVPQWICIFLII

SEQ ID NO: 36365 - protein, 48 aa, Homo sapiens
VALEAGKSEIKGPHLTWAFLLCLLFRRAGVGVAAPRKATPEITALVNS

SEQ ID NO: 36366 - protein, 38 aa, Homo sapiens
MLFVLIILCKCPHFVAVCLLGRGLLQLQFLDFGLTLFS

SEQ ID NO: 36367 - protein, 12 aa, Homo sapiens
MQCFWILLIPVA

SEQ ID NO: 36368 - protein, 22 aa, Homo sapiens
VVLIKNLVWTLALFAFYKPNSI

SEQ ID NO: 36369 - protein, 24 aa, Homo sapiens
IPLSQKILSEQLCTLFLACASGWC

SEQ ID NO: 36370 - protein, 30 aa, Homo sapiens
KNFLRCSFFSSSPSWLTSAISGPTQMSLRK

SEQ ID NO: 36371 - protein, 58 aa, Homo sapiens
LLKLSRSCAGLAAASPPGATATAAASAAAVRGMLSSPLPGPRDPVFLGSRLLLQSCTN

SEQ ID NO: 36372 - protein, 14 aa, Homo sapiens
METLDIGFFCAVLL

SEQ ID NO: 36373 - protein, 30 aa, Homo sapiens
LLEGSNQPAPLALLLVCAAFQRENSCSKRK

SEQ ID NO: 36374 - protein, 17 aa, Homo sapiens
LPSMTFILMTFLSTLMP

SEQ ID NO: 36375 - protein, 18 aa, Homo sapiens
LDILSMIIQYLLMGSLFS

SEQ ID NO: 36376 - protein, 29 aa, Homo sapiens
LGKNRIWSCHLCCACLIGDVHCLTPFKSS

SEQ ID NO: 36377 - protein, 11 aa, Homo sapiens
LALMVLMVFLD

SEQ ID NO: 36378 - protein, 37 aa, Homo sapiens
VWELARRIRQSLSRLLLTQAWCISWMISAPCQLCLSS

SEQ ID NO: 36379 - protein, 14 aa, Homo sapiens
MTLFWKMLLLQSAL

SEQ ID NO: 36380 - protein, 9 aa, Homo sapiens
IVILFCMYV

SEQ ID NO: 36381 - protein, 31 aa, Homo sapiens
RASLSQLSGALLVAAVSSEFLALSMRRLVVF

SEQ ID NO: 36382 - protein, 66 aa, Homo sapiens
LHQSTVRFMKKNKLRTTLYVHLQMPQLMLVGCLSAFCDNEHMDFCLLNSVDPFSQLPGAWIFTSNC

SEQ ID NO: 36383 - protein, 32 aa, Homo sapiens
LWFLYFFFSLYQKVFFNGKKNNFLFSFTNEFQ

SEQ ID NO: 36384 - protein, 57 aa, Homo sapiens
MPGHSWGQSDVAGVGMPKMKLGRMTQSGRRGLGLQVSALASVGPHSFASFAPCLSFL

SEQ ID NO: 36385 - protein, 101 aa, Homo sapiens
LCVCVCVCMCVCVHACAAGKGRGECEGPGGRWRRARGALAPPQSNLRPRPARGRALTGAVRSCGGRHYSPAPTSPPPLPTVKEREASTTPRPKQKALWITK

SEQ ID NO: 36386 - protein, 33 aa, Homo sapiens
MLLPKLCLISAGGAQLTGNVSPEAEKLPGKGLS

SEQ ID NO: 36387 - protein, 53 aa, Homo sapiens
LWSCSETRPWAPLQPLSMTPSGFGWLWGRGPRGGLALSVVAASSLATMANAEI

SEQ ID NO: 36388 - protein, 59 aa, Homo sapiens
LALFLSLQGALGGTGSSQILLLVYSYHLASVFLGNAAVLMHLVSFWSYSGQAFVTALWD

SEQ ID NO: 36389 - protein, 51 aa, Homo sapiens
VSPVTFMTLVWIISLSLRFLSFLMMTRVTLILLSNMKKSVTLFPFEKSWYC

SEQ ID NO: 36390 - protein, 17 aa, Homo sapiens
LMNFYITVHVLCFAVIP

SEQ ID NO: 36391 - protein, 55 aa, Homo sapiens
KHMGNCIPIQGSIGSSNKSGKTYYKFVAVIQLLIFSRGLTPLDSGWSWEDVNPVP

SEQ ID NO: 36392 - protein, 115 aa, Homo sapiens
IRAPRQLLRLPAGGPALARPASARCPAARTLPTLLSSPTLELPLCLSCCCAGAPTAERRLQSRRDAPTLRRRWRRRGGPGTLRHGRDDPLQGRGRSSEGKDLRRDQSSRRGRRFS

SEQ ID NO: 36393 - protein, 10 aa, Homo sapiens
IWLNAILWIF

SEQ ID NO: 36394 - protein, 35 aa, Homo sapiens
KIISFVLLLLMLLLLYLTWVFYNVVFNFNCQSLNM

SEQ ID NO: 36395 - protein, 29 aa, Homo sapiens
MMERSMMILLMAASMTMTSTQLWSFCCVH

SEQ ID NO: 36396 - protein, 36 aa, Homo sapiens
LPPLGLSSSSLFLCSQSSIIDPTTCALKTECSISEL

SEQ ID NO: 36397 - protein, 40 aa, Homo sapiens
KMAARSSSGVAAAEGAAALAAAETAAVTVAAAARDLGLGE

SEQ ID NO: 36398 - protein, 51 aa, Homo sapiens
MLLRSPGPLLRFLSFGHALSSVGYWKTIKAQRWFTWRCGCYHRCLVTEPGA

SEQ ID NO: 36399 - protein, 28 aa, Homo sapiens
MEVLGCGAAGCGCAQGDGMESLSWHSYK

SEQ ID NO: 36400 - protein, 40 aa, Homo sapiens
LLFKTRKRRRKRKKRKMLGNIYLTCSTARTLASCCYSCKY

SEQ ID NO: 36401 - protein, 31 aa, Homo sapiens
MAPLRRLTVWRVGLRLGPAGAAGGPGEASSV

SEQ ID NO: 36402 - protein, 141 aa, Homo sapiens
RRRGPGSGAKRPRCATSWGSSWPAMAATPRLWSSTGRSCSFGSALTTLWAVPWPTARSESAWPRWRTTRLPCSTSTSTWSWHIPCATTRSCRGPGPPSAAPTWTSMTTASRGMLCCRHRLPLRRAWLLWMRSWRGHWPRES

SEQ ID NO: 36403 - protein, 28 aa, Homo sapiens
LLLLMCTARAMLTGTSSQKICCLMNIIN

SEQ ID NO: 36404 - protein, 33 aa, Homo sapiens
ISFFYLFLLAPKLPGSHFLLLEFNQILPTPAPS

SEQ ID NO: 36405 - protein, 43 aa, Homo sapiens
RMEVAALLVFRTCWIRSLCVWPQPLETSYSAVSAHNSWSVLGV

SEQ ID NO: 36406 - protein, 25 aa, Homo sapiens
ISPLEVMSLKMMSRKLQERISPQNQ

SEQ ID NO: 36407 - protein, 20 aa, Homo sapiens
MMMSNVMLMLQLQPLLAQPL

SEQ ID NO: 36408 - protein, 30 aa, Homo sapiens
MVRAAPTAAAPAPRAAAPCSGDRAPRAPRS

SEQ ID NO: 36409 - protein, 19 aa, Homo sapiens
MKYLAWSLLYRKHSIISNY

SEQ ID NO: 36410 - protein, 55 aa, Homo sapiens
MGFGSLQALSAAARSAMVTWWSRDTSGAAVGGTRGERGRRLRPGTGCCHPSLPFL

SEQ ID NO: 36411 - protein, 60 aa, Homo sapiens
MSSASMRTCPVQSTISTERYHQHILSLCCSKLGSTMMLAGSCLGGGWPPGHQESSTLIPH

SEQ ID NO: 36412 - protein, 54 aa, Homo sapiens [sequence omitted]

SEQ ID NO: 36413 - protein, 45 aa, Homo sapiens
MDQILESNKFTKGFALLSWLGCSGMNMAHCSLDLLYSSNPPSSVS

SEQ ID NO: 36414 - protein, 36 aa, Homo sapiens
MPRSRPPSQAPPAPPHPGLPAVLLPPPPLPASSTGP

SEQ ID NO: 36415 - protein, 168 aa, Homo sapiens [sequence omitted]

SEQ ID NO: 36416 - protein, 43 aa, Homo sapiens
MSEKRKKKMAVLHCRNLLIIMLKMRAEAVAAGRLFPTSVISNG

SEQ ID NO: 36417 - protein, 124 aa, Homo sapiens
MGMKAACWRGRRTRRAGPLPSMLHPGPCAWAFSQWPPHSRTGHSPGRRLHGCRRPRGPWARQPLSTVARSGVLEPSGCLADKGRSVCPLLVLVEDPRSDVLGQSWSQTEPGVVCRAALGPGGCV

SEQ ID NO: 36418 - protein, 42 aa, Homo sapiens
MHVTTSLSFVFPTFQMGCSGPCCLPENNFKATLRALYGRWQL

SEQ ID NO: 36419 - protein, 40 aa, Homo sapiens
MVSLKLIGRPLLPKLTHLWCTFVVNVLMLPISCGSPITSF

SEQ ID NO: 36420 - protein, 158 aa, Homo sapiens
LGSASISVALFSPSWYSPPNLGFLHARVASCSTSLSLILVSTSSPGKFPFSRLALPTRASDFHPSFSLLASDYPPPIPPRPAAQLPPPFTRTGTIIPTPLRPVWDSTCLLPNPTLISAWSLPLWPNLSSRLIGDGHSHSLVPNTSSWMDSRHPCPLFN

SEQ ID NO: 36421 - protein, 38 aa, Homo sapiens
ISRLGLLGTATLTVWFQTPVPGWIPAIHAPSLISRSSQ

SEQ ID NO: 36422 - protein, 48 aa, Homo sapiens
VYMIVSHVQGEDRATRRVKVVEGNMACFPLQQGLPLQDREEELCHPCV

SEQ ID NO: 36423 - protein, 84 aa, Homo sapiens
LASMWPLQHISVASVSVVSFLCLAPHGFKSTRAGVETAHLALILSDWWFWPVSRYLSIGKAALRCGGHPDSHRLHSRNGSMRLY

SEQ ID NO: 36424 - protein, 13 aa, Homo sapiens
ILMFRGLVLVHLS

SEQ ID NO: 36425 - protein, 15 aa, Homo sapiens
VLMCPLKMPGKQWLL

SEQ ID NO: 36426 - protein, 16 aa, Homo sapiens
KIVFLLTLTMQRPPWL

SEQ ID NO: 36427 - protein, 13 aa, Homo sapiens
TLLRSSVACVSLG

SEQ ID NO: 36428 - protein, 73 aa, Homo sapiens
MYFLVIWSFFFFNFKILRQALTMLPRWSQTPGFQRCSCLSLPKGWDYRCEPLCPAHLYISFGEYLGSFEGSCI

SEQ ID NO: 36429 - protein, 28 aa, Homo sapiens
LHSVDFQGKKKTVLVVVIINIWTSVMVK

SEQ ID NO: 36430 - protein, 15 aa, Homo sapiens
LCFFLFQFILNAYFS

SEQ ID NO: 36431 - protein, 7 aa, Homo sapiens
ILVIFVG

SEQ ID NO: 36432 - protein, 19 aa, Homo sapiens
VLLLLFTLLLGFYEGFVKS

SEQ ID NO: 36433 - protein, 53 aa, Homo sapiens
ILGSGITALMSQFCCHPALSMASQFPKSAWKMWGAPHRLANGKRMKIGLTSLS

SEQ ID NO: 36434 - protein, 70 aa, Homo sapiens
IGAHPRVPQAFGICLLSGARERGGQVPNLASGLSWQLALRSSPWNPGPTVLPAPCLFFSFSFSHCLFLNL

SEQ ID NO: 36435 - protein, 39 aa, Homo sapiens
RTVYIMSLSSVTRFTMMLRVLIMTMMPSWVLKKQRPLIS

SEQ ID NO: 36436 - protein, 41 aa, Homo sapiens
MHNVKQCKSERCKIPIKELEADRCASDNSHLPTQEHSFHFP

SEQ ID NO: 36437 - protein, 39 aa, Homo sapiens
RYQHCKHQVCLETCLCLSFLSSVSTGYVSHCQIPDHKSP

SEQ ID NO: 36438 - protein, 72 aa, Homo sapiens
VCPVLPSERSLCLRSLTILILSSCWMSFTQKINSTWFLNFCTKISRNSWMPLLSLAFLFPSSRAICSSCSRA

SEQ ID NO: 36439 - protein, 24 aa, Homo sapiens
LCALGSFLLNSLLSTFRLNSSAPS

SEQ ID NO: 36440 - protein, 25 aa, Homo sapiens
MTGTASRLAGSSALGFCAPWASSSS

SEQ ID NO: 36441 - protein, 44 aa, Homo sapiens
LKTYRGRRTGIILFVSCFETSICKVSVESQILAPGTFYIHKYKN

SEQ ID NO: 36442 - protein, 11 aa, Homo sapiens
LLIVWAMIISG

SEQ ID NO: 36443 - protein, 32 aa, Homo sapiens
IMSRIIGRYTEFVFQLCLSFLLRASEFLVLKG

SEQ ID NO: 36444 - protein, 45 aa, Homo sapiens
MLGLSIILNLLFLRENTRFCWNCTLKNGPPWPVPMLLSCAPDCGL

SEQ ID NO: 36445 - protein, 28 aa, Homo sapiens
MRLYNAQASPRDGTSSNYQLIMSQADNR

SEQ ID NO: 36446 - protein, 12 aa, Homo sapiens
RNLHLFWLLQMW

SEQ ID NO: 36447 - protein, 21 aa, Homo sapiens
VAGPASWKLFLMQVVLLPYAF

SEQ ID NO: 36448 - protein, 20 aa, Homo sapiens
RLWLLLRSAMAFLWQPLRRP

SEQ ID NO: 36449 - protein, 11 aa, Homo sapiens
LPWRLGFLSWF

SEQ ID NO: 36450 - protein, 67 aa, Homo sapiens
RTTLSMSWQIWGTKSHVIPVTPHVLLMATFNTIPMWCIIQKENSWHVTISTTCTLSLSLMSLKSRSW

SEQ ID NO: 36451 - protein, 12 aa, Homo sapiens
LIYSSMILVLPW

SEQ ID NO: 36452 - protein, 8 aa, Homo sapiens
MVVLLFWI

SEQ ID NO: 36453 - protein, 23 aa, Homo sapiens
LWKDLGLLLSQLSMDSASRPFLT

SEQ ID NO: 36454 - protein, 27 aa, Homo sapiens
MCCVRTTAAATIFTCGVRARTACLSCS

SEQ ID NO: 36455 - protein, 12 aa, Homo sapiens
RIMCVGVSWTLL

SEQ ID NO: 36456 - protein, 23 aa, Homo sapiens
RYCSSFLLIFAGQSMLYLNPTLI

SEQ ID NO: 36457 - protein, 38 aa, Homo sapiens
VFLKVILTLLLISYLHEYFSLFSVSLKIELPTPKYEIG

SEQ ID NO: 36458 - protein, 43 aa, Homo sapiens
MCHLELGVIVVLGKILPMFKLRQFGPLCFVYMNLISLMDTFPL

SEQ ID NO: 36459 - protein, 14 aa, Homo sapiens
IWKRGVSFSVLCSL

SEQ ID NO: 36460 - protein, 35 aa, Homo sapiens
IEMRRIHLGLAFALGWCWKLLVVARSLLHCKGVRI

SEQ ID NO: 36461 - protein, 14 aa, Homo sapiens
VIPWMVTILLNAAP

SEQ ID NO: 36462 - protein, 7 aa, Homo sapiens
LWIAGML

SEQ ID NO: 36463 - protein, 27 aa, Homo sapiens
MRGLRSMPSILSNLISLDTNMALSALR

SEQ ID NO: 36464 - protein, 11 aa, Homo sapiens
ILTWAALVMIR

SEQ ID NO: 36465 - protein, 22 aa, Homo sapiens
MLIRASLGSGLLTCHQRSSTGF

SEQ ID NO: 36466 - protein, 31 aa, Homo sapiens
MSATVRPMKMMFQCLAWPSHSKQKIFCMLRK

SEQ ID NO: 36467 - protein, 19 aa, Homo sapiens
VNLKAFLIGLLMKTVYSVA

SEQ ID NO: 36468 - protein, 47 aa, Homo sapiens
LSFLWTKMSFLRVIFKFKRCSCRCCSIFAVTLRAWRDSSQEVSCSLC

SEQ ID NO: 36469 - protein, 29 aa, Homo sapiens
LGTHVTLLVMAWQSLICKSFFWIVPNDSL

SEQ ID NO: 36470 - protein, 21 aa, Homo sapiens
ISPRKWFLSSPVWSLLTTLFS

SEQ ID NO: 36471 - protein, 31 aa, Homo sapiens
VLAAVFQLSLGTAAVGRFQCIASPGCSSSWI

SEQ ID NO: 36472 - protein, 18 aa, Homo sapiens
KGPLPMLLVMPLSTVLSW

SEQ ID NO: 36473 - protein, 10 aa, Homo sapiens
MFLILVLISF

SEQ ID NO: 36474 - protein, 19 aa, Homo sapiens
LYFLFPLPLPGLLVLALWQ

SEQ ID NO: 36475 - protein, 21 aa, Homo sapiens
MTMDHSKNLPLPGLLVLALWQ

SEQ ID NO: 36476 - protein, 25 aa, Homo sapiens
LTQDCALTLLLQLPLPGLLVLALWQ

SEQ ID NO: 36477 - protein, 30 aa, Homo sapiens
ILRLIGMSIHAELAIGEVDPCMGKSSIPTV

SEQ ID NO: 36478 - protein, 25 aa, Homo sapiens
IRVSTPLLSFLATLLQSSTNYPCPG

SEQ ID NO: 36479 - protein, 14 aa, Homo sapiens
KNMLQETLWFPLFL

SEQ ID NO: 36480 - protein, 31 aa, Homo sapiens
IMYMNFSTPLMPASAILISISTLISLGVTWT

SEQ ID NO: 36481 - protein, 28 aa, Homo sapiens
IPAVVASLSAVTQGFWSLWMIFTFLAVD

SEQ ID NO: 36482 - protein, 28 aa, Homo sapiens
MRKNSTFSFVRPCANQLLLLLVLKHSGK

SEQ ID NO: 36483 - protein, 22 aa, Homo sapiens
RKSPILCALVLVPLWTKRCCPL

SEQ ID NO: 36484 - protein, 16 aa, Homo sapiens
LNMVLLLLSLILKRTW

SEQ ID NO: 36485 - protein, 15 aa, Homo sapiens
LNMVLLLLSLILKRT

SEQ ID NO: 36486 - protein, 33 aa, Homo sapiens
MIGLVSKTNAIISLKKKEIGIQVNTTVPLNMPT

SEQ ID NO: 36487 - protein, 18 aa, Homo sapiens
ISGESRKLLSYLQLVAIM

SEQ ID NO: 36488 - protein, 9 aa, Homo sapiens
ILGISGLFC

SEQ ID NO: 36489 - protein, 143 aa, Homo sapiens
LTAWRTCFSSCCQMTDVWSWQHLSPFTPGPEPGQPTMGMLCFCSPSFTMPVSSPPRWGLGGMDRQRMSSTQGLQDLPVAHSARLSTTTPAKEDSIWQSFFQVPSYTCASAFLSWMMVFSLFLSLLSLTALVFHVAHPLSSVNL

SEQ ID NO: 36490 - protein, 17 aa, Homo sapiens
MLGTYPVYILPRHPAWK

SEQ ID NO: 36491 - protein, 10 aa, Homo sapiens
IVKTSIFIWL

SEQ ID NO: 36492 - protein, 22 aa, Homo sapiens
TPDTDVARTAGLGELGCPTSFK

SEQ ID NO: 36493 - protein, 12 aa, Homo sapiens
ITTDILVFLGIL

SEQ ID NO: 36494 - protein, 35 aa, Homo sapiens
IFSGRVPGSSSSFLLFLLLLHLRLLGDHCPLSAAE

SEQ ID NO: 36495 - protein, 19 aa, Homo sapiens
LKIAISRYVTLFSRISLIL

SEQ ID NO: 36496 - protein, 11 aa, Homo sapiens
ILSGIISIVCY

SEQ ID NO: 36497 - protein, 14 aa, Homo sapiens
IVQIALVFNLLLLD

SEQ ID NO: 36498 - protein, 12 aa, Homo sapiens
MPYPVPKKTLGP

SEQ ID NO: 36499 - protein, 59 aa, Homo sapiens
LLHLKLRTLPCLPNHKYPTQYLQINASLIYSFHETLQIFFLLVLGLAFFFFFFSLQGNI

SEQ ID NO: 36500 - protein, 32 aa, Homo sapiens
MGCDTLLFFFFLFFQSFLLAQLQCVPEWGRGG

SEQ ID NO: 36501 - protein, 92 aa, Homo sapiens
IKNRGGCLLLLVLHPSRHSAVSCLGVAAAMARKALPPTHLGQSWFCSCCRDTELAISALRARTATGSPGSCRCTAGPLPCASALESCCCRVT

SEQ ID NO: 36502 - protein, 19 aa, Homo sapiens
LWSQLLGRLRWEDCLSLGG

SEQ ID NO: 36503 - protein, 16 aa, Homo sapiens
RERHNWLQPFSCLFLL

SEQ ID NO: 36504 - protein, 13 aa, Homo sapiens
MRFLRSIIVLLTP

SEQ ID NO: 36505 - protein, 64 aa, Homo sapiens
IHTAQNSWILLSLCQRKIPWRMPHNHLEGDALLRVPVLCIWRAWLRAEVGGRAPLPGRSVGHRN

SEQ ID NO: 36506 - protein, 25 aa, Homo sapiens
MAQSRLTATSVSQAQAILLPQTPRF

SEQ ID NO: 36507 - protein, 16 aa, Homo sapiens
LRLSRMICGLTLYATT

SEQ ID NO: 36508 - protein, 12 aa, Homo sapiens
VILNVFILTFLT

SEQ ID NO: 36509 - protein, 32 aa, Homo sapiens
IMFTKAFGSLVTSCAASAPMLCMSTSIVASSL

SEQ ID NO: 36510 - protein, 23 aa, Homo sapiens
MLSILICQVILKNMCIVLAVQDV

SEQ ID NO: 36511 - protein, 16 aa, Homo sapiens
LKTLFLKWFVLMLLSN

SEQ ID NO: 36512 - protein, 22 aa, Homo sapiens
RTEFIVWHLYLMPALFNTSPLR

SEQ ID NO: 36513 - protein, 14 aa, Homo sapiens
IHSIVCVVLVLCPN

SEQ ID NO: 36514 - protein, 31 aa, Homo sapiens
IKLEIVCRLISLLTCSSVSAMFEIFVLDGES

SEQ ID NO: 36515 - protein, 35 aa, Homo sapiens
MRSVKSSGSPRAGARKIIASLLLPTPNSPVTRHPT

SEQ ID NO: 36516 - protein, 15 aa, Homo sapiens
LILLSHPFFSLLLFA

SEQ ID NO: 36517 - protein, 9 aa, Homo sapiens
IWMASVAFM

SEQ ID NO: 36518 - protein, 46 aa, Homo sapiens
MMAPASKTLTGASHLWGAALWSLQAPGRWGSQPSCTRSGCRGARSC

SEQ ID NO: 36519 - protein, 18 aa, Homo sapiens
MFAAMGSWRYILSHLWLM

SEQ ID NO: 36520 - protein, 50 aa, Homo sapiens
LLLPGLFYYGRRCGVLLQSFHVIVSWLVHFIKWLHPNICIWSRLQKRTED

SEQ ID NO: 36521 - protein, 15 aa, Homo sapiens
MESFGQYWGVRNSSV

SEQ ID NO: 36522 - protein, 12 aa, Homo sapiens
ITGMVNMAFLIL

SEQ ID NO: 36523 - protein, 10 aa, Homo sapiens
IVFLLTLTGS

SEQ ID NO: 36524 - protein, 15 aa, Homo sapiens
IVFLLTLTMQRPPWL

SEQ ID NO: 36525 - protein, 21 aa, Homo sapiens
IKLLWGLPIHLVVSSLSLAIL

SEQ ID NO: 36526 - protein, 39 aa, Homo sapiens
MEWRHMSSTSLVPGASPSVPKASCTAASSALATVWPTRQ

SEQ ID NO: 36527 - protein, 12 aa, Homo sapiens
LLSLYLFLLTLL

SEQ ID NO: 36528 - protein, 54 aa, Homo sapiens
ILSQRETWRSRFHMMLTLRALQLSLPTKIGGACFRVSRLSPTEKKKKKMSLEEA

SEQ ID NO: 36529 - protein, 30 aa, Homo sapiens
MKPRGYCRGLWCMCVCVRLCVFVCLCVLPQ

SEQ ID NO: 36530 - protein, 25 aa, Homo sapiens
RGVTSLLLSLSSSSAPRFRGCPSAL

SEQ ID NO: 36531 - protein, 12 aa, Homo sapiens
IMKKKMLLYWIL

SEQ ID NO: 36532 - protein, 23 aa, Homo sapiens
LGRGELLEKMVKLVLLVLWARRV

SEQ ID NO: 36533 - protein, 58 aa, Homo sapiens
TPSPLHPISLFRWLLGGEQFCGFFSPIILTRSGLRVSPASAHCVHLALPCFPQPVARL

SEQ ID NO: 36534 - protein, 12 aa, Homo sapiens
ITLFSPLFCFQL

SEQ ID NO: 36535 - protein, 15 aa, Homo sapiens
MMKIGLPLSLILIPW

SEQ ID NO: 36536 - protein, 38 aa, Homo sapiens
VVAVLWVWPFATVLAVASLWLSLRRSKPVHGTRSSASA

SEQ ID NO: 36537 - protein, 42 aa, Homo sapiens
VRAALSAAAAAAAREAGRRGAPGTAADGGGGGMRLLALPIVG

SEQ ID NO: 36538 - protein, 20 aa, Homo sapiens
IVLLLLFTLLLGFYEGFVKS

SEQ ID NO: 36539 - protein, 17 aa, Homo sapiens
LKEKEALWLYILWAWVS

SEQ ID NO: 36540 - protein, 16 aa, Homo sapiens
MIFTLLIFTGFQKVWV

SEQ ID NO: 36541 - protein, 17 aa, Homo sapiens
LGTKLLISFATLCIPSL

SEQ ID NO: 36542 - protein, 19 aa, Homo sapiens
IEDEGFFLFIFLMALQNLK

SEQ ID NO: 36543 - protein, 19 aa, Homo sapiens
ISRIMMMISSFTLKFTLIH

SEQ ID NO: 36544 - protein, 16 aa, Homo sapiens
VINWILIWLFAEMLEK

SEQ ID NO: 36545 - protein, 29 aa, Homo sapiens
MENMLRSCLMTFLKIILMLFVQWKIQIKS

SEQ ID NO: 36546 - protein, 31 aa, Homo sapiens
VCVSVCACVYFVLGRTQPMCSAWTLLILCLA

SEQ ID NO: 36547 - protein, 9 aa, Homo sapiens
LAVLWGFWS

SEQ ID NO: 36548 - protein, 63 aa, Homo sapiens
MVVGVQLPGTILGSGITALMSQFCCHPALSMASQFPKSAWKMWGAPHRLANGKRMKIGLTSLS

SEQ ID NO: 36549 - protein, 11 aa, Homo sapiens
RHRFLLNLLLL

SEQ ID NO: 36550 - protein, 14 aa, Homo sapiens
IGAFSCSLLLEFFS

SEQ ID NO: 36551 - protein, 26 aa, Homo sapiens
LLLALGVLLLVPVPWMKASLRASWEE

SEQ ID NO: 36552 - protein, 21 aa, Homo sapiens
TFRHSNAGFVRVCLLSGLAGC

SEQ ID NO: 36553 - protein, 58 aa, Homo sapiens
RSVTAGAFWNAAILLPSSRGATSRVSQTAWSGFFALVLPRSLYSGRAVHGSVELSSLR

SEQ ID NO: 36554 - protein, 54 aa, Homo sapiens
LLRHQAEGYRQGSCDLNPLLPQYRILSLTLPFVFPPMFKMFGWFVVLPGDKVLT

SEQ ID NO: 36555 - protein, 59 aa, Homo sapiens [sequence omitted]

SEQ ID NO: 36556 - protein, 30 aa, Homo sapiens
IAALSSMCILDNCVVMLLTLIAMMMSKVSY

SEQ ID NO: 36557 - protein, 14 aa, Homo sapiens
LFLVLIYFCLPFPT

SEQ ID NO: 36558 - protein, 31 aa, Homo sapiens
KMTVWILRNFVLLVRGSLSRPCTVHWYGRCF

SEQ ID NO: 36559 - protein, 34 aa, Homo sapiens
MKEHLPCLKLLETRGPTTPVAFVGAVVAAAPASL

SEQ ID NO: 36560 - protein, 11 aa, Homo sapiens
TIVMLSMLSSL

SEQ ID NO: 36561 - protein, 43 aa, Homo sapiens
MGCQTRLLSCPTCLHFSLSTLLFWVWTVLERQLSYTGCSSMNL

SEQ ID NO: 36562 - protein, 61 aa, Homo sapiens
MQQKPHRLERNKSSFLCPGAGCGALAEPSLQSPPGPLAVEGGASRGDRGTRRAEPGGPQGP

SEQ ID NO: 36563 - protein, 32 aa, Homo sapiens
KEPGTLDTEVTCAFGTSLWKTQTLHDTQTRSR

SEQ ID NO: 36564 - protein, 44 aa, Homo sapiens [sequence omitted]

SEQ ID NO: 36565 - protein, 17 aa, Homo sapiens
KWGMTSWGTLWWASGCG

SEQ ID NO: 36566 - protein, 41 aa, Homo sapiens
VVVKMVTLMMMVMMMMMTEVVMAYPFISVCHAHPIENHRKR

SEQ ID NO: 36567 - protein, 12 aa, Homo sapiens
RPVIVAMSLVLV

SEQ ID NO: 36568 - protein, 15 aa, Homo sapiens
VCLFARLVIYLLCLN

SEQ ID NO: 36569 - protein, 37 aa, Homo sapiens
VVVFWLLLLFAHAFHHHLLSSDCEENPQSRESLYPRE

SEQ ID NO: 36570 - protein, 33 aa, Homo sapiens
IWQTVKRVRLHCTRLPASGTGLCASFWWMQEHL

SEQ ID NO: 36571 - protein, 22 aa, Homo sapiens
ICGLGMWLINLICWPNVPHVIK

SEQ ID NO: 36572 - protein, 24 aa, Homo sapiens
MLRRTTVFLLNLVFEMSCWDMQIK

SEQ ID NO: 36573 - protein, 15 aa, Homo sapiens
MQKPRVVFLLMMQIL

SEQ ID NO: 36574 - protein, 14 aa, Homo sapiens
LTPELKLYMFFLFG

SEQ ID NO: 36575 - protein, 40 aa, Homo sapiens
MRISQLWLSACMHESSSFLLNSLALWTLLPRRAKTPELEA

SEQ ID NO: 36576 - protein, 17 aa, Homo sapiens
MRLLQPASVLFLLASNL

SEQ ID NO: 36577 - protein, 11 aa, Homo sapiens
LWITSCWLIAL

SEQ ID NO: 36578 - protein, 10 aa, Homo sapiens
MQTLLLQVLL

SEQ ID NO: 36579 - protein, 44 aa, Homo sapiens
VPACSPPLWMTMRLTCSLTVLLGLSWKEKTQIHLRIWKQMKTPF

SEQ ID NO: 36580 - protein, 20 aa, Homo sapiens
LGLNRVTWILSFLPSHMLTF

SEQ ID NO: 36581 - protein, 31 aa, Homo sapiens
MKATGAAPGTAFASTQNQCSGSEILDRKSIL

SEQ ID NO: 36582 - protein, 28 aa, Homo sapiens
KSFLIFLIHHLMFLRDYRCLMIPVTREE

SEQ ID NO: 36583 - protein, 25 aa, Homo sapiens
IALLSLIASQASSWSVFAQCPASKA

SEQ ID NO: 36584 - protein, 28 aa, Homo sapiens
ISITICRIPFWASFWKLLLGLLFLSAHI

SEQ ID NO: 36585 - protein, 12 aa, Homo sapiens
RSWSVLGMLLMK

SEQ ID NO: 36586 - protein, 17 aa, Homo sapiens
LSSYGWTLWWRIALVGA

SEQ ID NO: 36587 - protein, 10 aa, Homo sapiens
IFLMTLTCVG

SEQ ID NO: 36588 - protein, 14 aa, Homo sapiens
VQVWALTWLWMQSF

SEQ ID NO: 36589 - protein, 17 aa, Homo sapiens
RREMDMAHCSTILLLFL

SEQ ID NO: 36590 - protein, 34 aa, Homo sapiens
MSSCPSCFVSWHLVWWFSSCFRIQSLWMMTASKW

SEQ ID NO: 36591 - protein, 25 aa, Homo sapiens
ILLRTLLVVVLIDFLLSIYLKDGTD

SEQ ID NO: 36592 - protein, 17 aa, Homo sapiens
VLYFYTPLSWNCLIFVL

SEQ ID NO: 36593 - protein, 40 aa, Homo sapiens
LRSRRHRLGALSWPLFPQMSDSDSRTEKRKKKRPNGKATF

SEQ ID NO: 36594 - protein, 25 aa, Homo sapiens
LTNIVQFLLLVGFLSCVSLVFVKFN

SEQ ID NO: 36595 - protein, 52 aa, Homo sapiens
MEYILNLEPKKMKGLFLLTTNVSVPGLLPGSSVLPKILMRTLWRETSELLFL

SEQ ID NO: 36596 - protein, 17 aa, Homo sapiens
LAPQVWDFWVFSWLASC

SEQ ID NO: 36597 - protein, 63 aa, Homo sapiens
RTKNLPCKFIIECARAVWSWIQPPWLASLSLMSLPLCSLLWESSALLDMRLEGCLGLPTHKLC

SEQ ID NO: 36598 - protein, 13 aa, Homo sapiens
LLWLSLICLLGLL

SEQ ID NO: 36599 - protein, 82 aa, Homo sapiens
MESSGRAGQRRLGPPLEGVLLFLLAPAALAGPSCGPFPQAGAAAALTHFLLQTARGPTCLPWLSMSLATPWAWATPQPPTPL

SEQ ID NO: 36600 - protein, 65 aa, Homo sapiens
MQCTLSYSPSHWLKSSSGLTPIHQRRQDSPCWLLPALLTSAASYGSTLRRVPGCILCLPNSASWV

SEQ ID NO: 36601 - protein, 19 aa, Homo sapiens
LAEFFFALILETSLCLVET

SEQ ID NO: 36602 - protein, 55 aa, Homo sapiens
MWLQMAGFPKGFWLKHIPWCICTAVSSSLQLCLNRSFTMLSSRFNSMAPNDEISF

SEQ ID NO: 36603 - protein, 61 aa, Homo sapiens
LFLATSCEKTNIWVTLVSTLVLLLVIVASAAIDHTRVVIQKLVSLFICLVNFIIWFLSITN

SEQ ID NO: 36604 - protein, 52 aa, Homo sapiens
IQACLSLSLSFMPLSPPHLGTASSKNSCYDTEFNQEVMPHSIRNYATAEEVY

SEQ ID NO: 36605 - protein, 70 aa, Homo sapiens
IPGWPENLSLVKSNIKICLLLILMLPAQQVHQRARMNYGCHECPCEAVGKPWLDCEGYLKSILESTRSSM

SEQ ID NO: 36606 - protein, 38 aa, Homo sapiens
MMRMKTFMVIHFYLMNSGAQLTGNVSPEAEKLPGKGLS

SEQ ID NO: 36607 - protein, 25 aa, Homo sapiens
ILSHTLGFLVVSFSKTVDLNLLAQA

SEQ ID NO: 36608 - protein, 15 aa, Homo sapiens
MALAVGAGALLRPLR

SEQ ID NO: 36609 - protein, 50 aa, Homo sapiens
MLSFSSFFLFPPSLLSFPLSPPLPSAPLPTTFPLSTFSSTHCLSAGGVDI

SEQ ID NO: 36610 - protein, 55 aa, Homo sapiens
ILILSSCWMSFTQKINSTWFLNFCTKISRNSWMPLLSLAFLFPSSRAICSSCSRA

SEQ ID NO: 36611 - protein, 15 aa, Homo sapiens
LALDPTTRKNPKPNV

SEQ ID NO: 36612 - protein, 52 aa, Homo sapiens
LGFLRGRGEGVRDKSPSFLCFFFSFAFSSFIFLFVCIFFPLLVEVRFPPTRP

SEQ ID NO: 36613 - protein, 37 aa, Homo sapiens
KQQQFFFFLPLFLILDREVFLAFLPFFFFLQTKQKTA

SEQ ID NO: 36614 - protein, 30 aa, Homo sapiens
LYSQLFSFCKFFFFAVIPTLVTRSFSANCS

SEQ ID NO: 36615 - protein, 47 aa, Homo sapiens
LRARRAVLTAPRTLVSSLFSPRPSLGRAGTLAFPVPHGAAPTPDGVQ

SEQ ID NO: 36616 - protein, 27 aa, Homo sapiens
LDFFFFFFCTTLTRLLHLFFYEICEWQ

SEQ ID NO: 36617 - protein, 41 aa, Homo sapiens
TEPHTADGPELAERRLPWLLLTVSTSCTGKSPGLAIAIWKL

SEQ ID NO: 36618 - protein, 61 aa, Homo sapiens
MSLWSCLLFLCTPSPTTTSPSPDPSQPLRRQMSLWTPTSLNLIPTMPQMMTLCLRTLPGFG

SEQ ID NO: 36619 - protein, 55 aa, Homo sapiens
LHKAREITAGGKSMMGSRVLRTGKLLEAAGAGPGSPALAVFAFGRGQSLLFQVPA

SEQ ID NO: 36620 - protein, 51 aa, Homo sapiens
MGRAFPSRHKTARFECALVSASLTTAGTPGKNLSSYNSKCGGKTHQSRDGK

SEQ ID NO: 36621 - protein, 13 aa, Homo sapiens
VWVLLSVVWLWDP

SEQ ID NO: 36622 - protein, 27 aa, Homo sapiens
IDLENKVSTRCFVVSVFLLFTLPESVL

SEQ ID NO: 36623 - protein, 43 aa, Homo sapiens
IMSLKISKSYEIWDIFCTGCVCLCQFLININVGQSCLFSISKF

SEQ ID NO: 36624 - protein, 71 aa, Homo sapiens
LMKTLYSLCVTPIGQSMSSMYTTIPRSNYSLNKMMTLKFPPMKTSSGMKRRMKSIQEMTVMGQSLLRSAHG

SEQ ID NO: 36625 - protein, 35 aa, Homo sapiens
LMLARRPESSERQLDSWKRLLGWKSGGLGYSQLCR

SEQ ID NO: 36626 - protein, 26 aa, Homo sapiens
LSKVATLTVFSCCLCHLLCQKIPFQL

SEQ ID NO: 36627 - protein, 36 aa, Homo sapiens
RRLTFVRMTTLQSLMCLSPVSLIVTLQQLFMTLKRE

SEQ ID NO: 36628 - protein, 112 aa, Homo sapiens
LRFGGGVGAARRRSCGTRMQTQAEALTAGMAGVATAAAGAWTQPQLRPVELPQRTRQVRAETPRLRPGGHECGRTYSPSACLSRPPWRRKSPMGPWHQMPSPTKGWLGRISQ

SEQ ID NO: 36629 - protein, 63 aa, Homo sapiens
MLGAPAFLAAIQHSVHAPRGQRLLPPGAIAASAVSTAQPLSLCLRQPCRAAHPEARARMGSLR

SEQ ID NO: 36630 - protein, 45 aa, Homo sapiens
MGAFLLATSLKWNLLVALLPLQLWCYTEKLEVSKQTREKEKHQKV

SEQ ID NO: 36631 - protein, 82 aa, Homo sapiens
MWPLQHISVASVSVVSFLCLAPHGFKSTRAGVETAHLALILSDWWFWPVSRTTPGQFRGSFKGTRKGPGALFAQLCWGAALL

SEQ ID NO: 36632 - protein, 32 aa, Homo sapiens
MFAPPSLSTVSFFPPPLSLAVSSSLEECISSL

SEQ ID NO: 36633 - protein, 39 aa, Homo sapiens
MLPAIVGVSAVTRHFQPVATAGRQRRSSSRGACRLLQGK

SEQ ID NO: 36634 - protein, 25 aa, Homo sapiens
MFPGIMLRTAFRVAALFSSLHLGNT

SEQ ID NO: 36635 - protein, 73 aa, Homo sapiens
MVSPVYRNSSADGNFPPSCIKPESSHLAEIFLSRCCKASTDHLLCDPSWMGRIKEEGLKRMLLDIIYMTYFQK

SEQ ID NO: 36636 - protein, 19 aa, Homo sapiens
MVVAALFTTSKIRKQPKCP

SEQ ID NO: 36637 - protein, 62 aa, Homo sapiens
MSEVVCVGHGVGGKFMKGNLLPKFKGLKGCFKWDRKTLRKVHSRSSVVECCGKSGTLNEGTG

SEQ ID NO: 36638 - protein, 55 aa, Homo sapiens
METNVSLTRLYFVPGTGFGITPFKPHYHPSCYYSTLPLRRNKIFLLNSSNLRSHI

SEQ ID NO: 36639 - protein, 58 aa, Homo sapiens
MKKNKLRTTLYVHLQMPQLMLVGCLSAFCDNEHMDFCLLNSVDPFSQLPGAWIFTSNC

SEQ ID NO: 36640 - protein, 34 aa, Homo sapiens
MGSSGHQPRPPTSGARAPDPDLDPSLHPHPDSSS

SEQ ID NO: 36641 - protein, 71 aa, Homo sapiens
MSSRELPWPRSESSWDATGSESAPQVSPPAPPNLSIPTRITPSAAGRGARGMARRVGTWGTGGKGKPPSFS

SEQ ID NO: 36642 - protein, 42 aa, Homo sapiens
MAATSQLAMNMLLTVTHTHSSLFRPSWAVPSSIGCLMTAGKR

SEQ ID NO: 36643 - protein, 28 aa, Homo sapiens
MSGKMLYSVKNAYMILILWHFKLSTPRF

SEQ ID NO: 36644 - protein, 37 aa, Homo sapiens
MSRVELAESRALLHPTGLCVLGLARGEPRWQSSRTRP

SEQ ID NO: 36645 - protein, 151 aa, Homo sapiens
MCATTLGTTSWATSMSSSGGRRMESGPWLNSVTAGSTGRLCTGMYPRWLLQLHASAAHFPEPPEAALWAGTQAQVPQDQPAMSPHVLRPLYPQMSLTLSPSNHVPKNLFFFFFFLRWSLTLLPRLECIGTILVHGNFRLPGSSNSLPQPPK

SEQ ID NO: 36646 - protein, 35 aa, Homo sapiens
MISAHCSLNLLGSSSLSASECWDYRREPPRQAYEI

SEQ ID NO: 36647 - protein, 93 aa, Homo sapiens
IDPQEGGGVKAIGPLGRRSMRLGPRRRAACGRVAFGSSTFALVPVFAHLSILQSLVPAAGAASPVAISAQHLCYSHVTPGDPGAGAGQGPAPS

SEQ ID NO: 36648 - protein, 38 aa, Homo sapiens
LRVLLCLISLLLLCYMCVCHFQFFVKDTKNLGLHNTSR

SEQ ID NO: 36649 - protein, 19 aa, Homo sapiens
MREGSAMLFLQTRMLMAFM

SEQ ID NO: 36650 - protein, 63 aa, Homo sapiens
LIKEHTKIGGMKHLQNCPNGPSGDPGNKCLSSHDQSFYFFLILCIWLVYMSQNQVLKQEVIQK

SEQ ID NO: 36651 - protein, 37 aa, Homo sapiens
MVHLGILGTSVFQATTSLSTSSSYFVSGLCTCHRIRY

SEQ ID NO: 36652 - protein, 69 aa, Homo sapiens
VKQTHRILVIISGSLHFICLMEILSDIQQPCKWSGLCQTATNSCRTISEAAYPRSLMWKDMAVTAWGSK

SEQ ID NO: 36653 - protein, 26 aa, Homo sapiens
LLLTLSLFKLSLQLDARITFGAESPG

SEQ ID NO: 36654 - protein, 16 aa, Homo sapiens
LICISKPPIFLCLMLI

SEQ ID NO: 36655 - protein, 17 aa, Homo sapiens
KWTLTHLMLMFMAQTGT

SEQ ID NO: 36656 - protein, 76 aa, Homo sapiens
LVILHLFSQLPAAWVLGPPCCSPPSCCFSPATAPCAATHLPTAPILTCWAPGSSRWAPAVPSAMSTARLWDHKKKK

SEQ ID NO: 36657 - protein, 23 aa, Homo sapiens
VCCTFTLLCLGTVLFLFCKCLLP

SEQ ID NO: 36658 - protein, 17 aa, Homo sapiens
TKVSALMCFLPLMHWVS

SEQ ID NO: 36659 - protein, 29 aa, Homo sapiens
LQIIWCLILCCSGKTVVPDSGRQSQKHVE

SEQ ID NO: 36660 - protein, 12 aa, Homo sapiens
KKIKLLSFILMA

SEQ ID NO: 36661 - protein, 12 aa, Homo sapiens
LYWGYLGLCSLL

SEQ ID NO: 36662 - protein, 25 aa, Homo sapiens
RGFCFCFFLSFSCCRRVRRTFCLPP

SEQ ID NO: 36663 - protein, 40 aa, Homo sapiens
RITCTGLPSASLERMNLHHLTSLFSSYLLFVCLFLFLQLK

SEQ ID NO: 36664 - protein, 33 aa, Homo sapiens
LGAPWFRRQPPASSSFCCCSWGLCLLPTPALCP

SEQ ID NO: 36665 - protein, 21 aa, Homo sapiens
VRTPATWYSSSWMLIIACLPP

SEQ ID NO: 36666 - protein, 14 aa, Homo sapiens
TWAAPGAALVLVSF

SEQ ID NO: 36667 - protein, 56 aa, Homo sapiens
TWFPKMSMLPLPPSKPSAASSLWIGAPLASRLASTTSLPLWCLVETWPRYRELCAC

SEQ ID NO: 36668 - protein, 21 aa, Homo sapiens
LVTFLYMVRFYILIRPTPWDI

SEQ ID NO: 36669 - protein, 30 aa, Homo sapiens
REARCWWIHALRVLWCPVGGSDLLLCLRGL

SEQ ID NO: 36670 - protein, 61 aa, Homo sapiens
LNTHWDALPMETSCSLWVSSELFCRSVKVFFCLLALHLSALPHSSWTQDKNLGLAGMVELK

SEQ ID NO: 36671 - protein, 9 aa, Homo sapiens
IFITFSVLG

SEQ ID NO: 36672 - protein, 34 aa, Homo sapiens
LEEPAGLNQGDAEDDDLLPRPLEPSACARHPRLA

SEQ ID NO: 36673 - protein, 73 aa, Homo sapiens
VHLLLLSACLLPHRRVSGHPSFSAWGPHHHPQHCRCLFFTVSFSTHPLLSSLLPAPLNLPGPASPVMLGWSKH

SEQ ID NO: 36674 - protein, 11 aa, Homo sapiens
MRFGLILRAVV

SEQ ID NO: 36675 - protein, 37 aa, Homo sapiens
KNCAMKNGKLLRSCSSVRRAADKLDWGRFFLQDLQSV

SEQ ID NO: 36676 - protein, 69 aa, Homo sapiens
ITSTQEMSTEELMNEPSCDHLARQPKNKAVTMETKKRQKDTGSSLSRPAVHEALSEAHVTSGLLTYMRE

SEQ ID NO: 36677 - protein, 65 aa, Homo sapiens
IFDHFDSLFFSLRGVCVRARVCVFFFSSSSPRVASFLRVPYCLFSPLSFFLSVFFSPLCARRMCF

SEQ ID NO: 36678 - protein, 14 aa, Homo sapiens
LGFLFLLFINGQIY

SEQ ID NO: 36679 - protein, 27 aa, Homo sapiens
TRARRWGAAAWSTVGVPSVSVILQSEE

SEQ ID NO: 36680 - protein, 26 aa, Homo sapiens
ICSGILVEILLVLPGCSFCSSLVFFL

SEQ ID NO: 36681 - protein, 27 aa, Homo sapiens
TAAVRSGCGYCCGWCVVALGILLFFFL

SEQ ID NO: 36682 - protein, 11 aa, Homo sapiens
LSPGILLFFFL

SEQ ID NO: 36683 - protein, 21 aa, Homo sapiens
TDPHSSQGPQTSVSLGSSLMT

SEQ ID NO: 36684 - protein, 57 aa, Homo sapiens
IFSGRVPGSSSSFLLFLLLLHLRLLGDHCPLSAADTGCSSRLGLFTYAPHRSLGRPT

SEQ ID NO: 36685 - protein, 31 aa, Homo sapiens
MNETISVISQRVFLSFQGCVTGMVVGGFDSG

SEQ ID NO: 36686 - protein, 22 aa, Homo sapiens
LWLSLWLLCGTAFPQARMETRF

SEQ ID NO: 36687 - protein, 33 aa, Homo sapiens
IFHLTPSAKPPGPLVHPWWPLCLLCSVLPMAQT

SEQ ID NO: 36688 - protein, 18 aa, Homo sapiens
MTTSVLSLNGTFLLFPWC

SEQ ID NO: 36689 - protein, 74 aa, Homo sapiens
TAAVPAAATVVAVPAAAAAATGAAAPAAAAAPAADTAAAAPAEATSPPLPGPWASLHLRDQGQQKLAGILTKPE

SEQ ID NO: 36690 - protein, 38 aa, Homo sapiens
TLGVFLRPKPWLCHFLLAGLHYCVFVRPGVCPGHNQSS

SEQ ID NO: 36691 - protein, 36 aa, Homo sapiens
LEWQQEFSLVIMLKMFLCGYLHLLLAYSCMLLWLIW

SEQ ID NO: 36692 - protein, 39 aa, Homo sapiens
LVLAASCLLLQPLWPCDLQVLGDPQLRDPRKPRNGTIGI

SEQ ID NO: 36693 - protein, 36 aa, Homo sapiens
MWRDLSASLSLAAAGTPGLVFTALCPLLLEAQPLVL

SEQ ID NO: 36694 - protein, 58 aa, Homo sapiens
ISSLGLDCPYKSAQTTGWRLWLTWYRREQRYWDHMETTYYLLTTKFWKRGVDESDYQK

SEQ ID NO: 36695 - protein, 34 aa, Homo sapiens
MLARMFNNFCLQAIFPPGPPQVLSLQASATTPSL

SEQ ID NO: 36696 - protein, 32 aa, Homo sapiens
RRITLTWSSSIALLSTILWPRPMALHGCTGWG

SEQ ID NO: 36697 - protein, 25 aa, Homo sapiens
TQQDRISVDICLEEQFYCDILKKQI

SEQ ID NO: 36698 - protein, 34 aa, Homo sapiens
VSLFLLKPLSLTVPANRSGRPQHTRRTDTGSKLH

SEQ ID NO: 36699 - protein, 81 aa, Homo sapiens
LLLAPFRVLFPLPPSSLGLFLAVPVFYPSHLPLFCSPCFSLPSPPPFSPLCPFELFFALSLHLPFALSKSFIFPFAVCISP

SEQ ID NO: 36700 - protein, 112 aa, Homo sapiens
ICLFFAHPVSHCPPLRLFHPSVLLSSFLLCLFICLLHSQNLSSSHSLSVFLHNYIFLPLSPPTHIFLFPFLSLGTLPHAPLPHPLFPFPSSHPSIPIFPQQLPALAGSPQLV

SEQ ID NO: 36701 - protein, 28 aa, Homo sapiens
TFALGSLPTLPPISSASRTPWRSPARSN

SEQ ID NO: 36702 - protein, 19 aa, Homo sapiens
RLFFLLQERPLLLWSCVCV

SEQ ID NO: 36703 - protein, 54 aa, Homo sapiens
IFSPRSSPQGCASSSTSRSALSSTTQGRSCSTPSWTPCLCAVLWTSLLALTIPS

SEQ ID NO: 36704 - protein, 89 aa, Homo sapiens
MRLRSRSQGQRRRTGPLQCPVMIQPLQRPPAATPAACAGAAAVAAPGTKSGGARGRPPGRASCSPSPAVKYVPRQVLRRCRAGRSLLTS

SEQ ID NO: 36705 - protein, 35 aa, Homo sapiens
ISRTTYQRPYLSPWLSHPMEMALMVAQTRKGKSVV

SEQ ID NO: 36706 - protein, 21 aa, Homo sapiens
ILNVQRVFLLCFPGWSAMVPS

SEQ ID NO: 36707 - protein, 19 aa, Homo sapiens
LAVLSTWNTLPSLSSPPCH

SEQ ID NO: 36708 - protein, 51 aa, Homo sapiens
MRLQMCLPKSTASRVRRRAGWPRRRRSCVLGARSSTWTPPRVSSISLSTSC

SEQ ID NO: 36709 - protein, 25 aa, Homo sapiens
LLAEAAESVRLQVGSRGRDVSGVGC

SEQ ID NO: 36710 - protein, 18 aa, Homo sapiens
LAWVWEQQLLWLGLPAVW

SEQ ID NO: 36711 - protein, 35 aa, Homo sapiens
TEAAAAAAAAAAAAAAAAAVAAAAGKESVFPKKIT

SEQ ID NO: 36712 - protein, 35 aa, Homo sapiens
LWLTLLMYYLYPSGFTITSATTGLSREPFACSAST

SEQ ID NO: 36713 - protein, 13 aa, Homo sapiens
MILIHALNIMLAG

SEQ ID NO: 36714 - protein, 36 aa, Homo sapiens
KKRKKEKRKMRSKKMMEKKRSHRVLFKTALCSFIIW

SEQ ID NO: 36715 - protein, 17 aa, Homo sapiens
KELGLISAIILLWKLKY

SEQ ID NO: 36716 - protein, 20 aa, Homo sapiens
ITSPPSRWAMCLSSWALLSW

SEQ ID NO: 36717 - protein, 37 aa, Homo sapiens
VARWCWKALWCVWTTVSICGMETSYPPGCRPSRMLST

SEQ ID NO: 36718 - protein, 9 aa, Homo sapiens
LYWGYFFGF

SEQ ID NO: 36719 - protein, 12 aa, Homo sapiens
LMFRGLVLVHLS

SEQ ID NO: 36720 - protein, 79 aa, Homo sapiens
LPGPASTLLLFYHAAFLLEPEQLPEKRRTSKAFWNSPRRSGWRVPLKWTGPTISQSWPFTSCPLSSGEPHVWKSCGGCW

SEQ ID NO: 36721 - protein, 13 aa, Homo sapiens
MSWTCSGWLISMF

SEQ ID NO: 36722 - protein, 18 aa, Homo sapiens
VERLSMMKVSFLFLLTVT

SEQ ID NO: 36723 - protein, 45 aa, Homo sapiens
TRPLRRRRMLPLLACGPGIFLRQGPRRPPGHPKKGQAQLLPRFLL

SEQ ID NO: 36724 - protein, 66 aa, Homo sapiens
LRISKRRWQSGRKEVLGFGVFLFLFLFFNFLISTFSPTLSAAANASYLFCGAAHRWQLRVRKRGVF

SEQ ID NO: 36725 - protein, 48 aa, Homo sapiens
MHYGGKNEKEEIKKLNRMMARLILVTLSSVSPTRLTRGMNSPTGSRTL

SEQ ID NO: 36726 - protein, 24 aa, Homo sapiens
MMRAWLTATSASQLQVILLPQPPE

SEQ ID NO: 36727 - protein, 17 aa, Homo sapiens
MLPLTSSLSMKLILLSW

SEQ ID NO: 36728 - protein, 20 aa, Homo sapiens
IFHLTPLLLLGFNYANVGGE

SEQ ID NO: 36729 - protein, 24 aa, Homo sapiens
KWSWSWSASCPSPSPARSAACVTS

SEQ ID NO: 36730 - protein, 25 aa, Homo sapiens
IAVRRRSRWWDLTVGPISLFSALLA

SEQ ID NO: 36731 - protein, 41 aa, Homo sapiens
MKGLFLLTTNVSVPGLLPGSSVLPKILMRTLWRETSELLFL

SEQ ID NO: 36732 - protein, 48 aa, Homo sapiens
REGASGCSWSGLLSGDGPFLPALLFLLSALPPPAPCASPRSLGPGGGR

SEQ ID NO: 36733 - protein, 9 aa, Homo sapiens
LFFVWTLLG

SEQ ID NO: 36734 - protein, 34 aa, Homo sapiens
KVTRENFSIRGKMALSVLLGIMTLLGALGCQLLF

SEQ ID NO: 36735 - protein, 15 aa, Homo sapiens
ISILSVVWLTLRICP

SEQ ID NO: 36736 - protein, 78 aa, Homo sapiens
MPCNLLKCCPFPVIRQTPRRGPPRARPLPLSLAFCLSRSLSPLRFATLRLPSMDCIESRLRRELPLRFTLDFQAFFPY

SEQ ID NO: 36737 - protein, 72 aa, Homo sapiens
LPSVFPSVLILSPSALLCVPPLPLHFLSSHPQSHPRAVSLSGASPSCSLSPVLPTLTSRRPWPPSQTGSYSC

SEQ ID NO: 36738 - protein, 14 aa, Homo sapiens
IRVLLLIIFAWEVE

SEQ ID NO: 36739 - protein, 26 aa, Homo sapiens
IKGRTLLAGVCWTLSFHLLTKRIPIP

SEQ ID NO: 36740 - protein, 21 aa, Homo sapiens
LSETCLLLWPLVLSCSPAWCV

SEQ ID NO: 36741 - protein, 32 aa, Homo sapiens
RRCRVGFAKGQWKELRLGGIWFACLGLLLCMI

SEQ ID NO: 36742 - protein, 48 aa, Homo sapiens [sequence omitted]

SEQ ID NO: 36743 - protein, 51 aa, Homo sapiens
VALSGSNKSKLWVCECLCVLLFTSHLLKSVYVRGWGVCVKESEEEKEREIN

SEQ ID NO: 36744 - protein, 30 aa, Homo sapiens
VGSSARRQGWRGLCAPTSAAAWLCWPSCPP

SEQ ID NO: 36745 - protein, 55 aa, Homo sapiens
TPTAPLRAGWAAGSRLQRWVDLGSGFQHVAALGLPLLPAGVGQCPEQALFPSPVG

SEQ ID NO: 36746 - protein, 29 aa, Homo sapiens
RVSVVLVGLLVLLVLLKDRCSGKLGGLSH

SEQ ID NO: 36747 - protein, 12 aa, Homo sapiens
TEGERDRASNAI

SEQ ID NO: 36748 - protein, 62 aa, Homo sapiens
ICFATAWRQKIFQRLKTEMKTQVPKMKGSLLLCSLMSHMEGSPPAPQLSGTCWKGSFWNTSS

SEQ ID NO: 36749 - protein, 22 aa, Homo sapiens
MTTLGLLTGICPQTARTWVNMD

SEQ ID NO: 36750 - protein, 28 aa, Homo sapiens
LSWLKGLKCFLPWVLWLPSPSVLALWPN

SEQ ID NO: 36751 - protein, 25 aa, Homo sapiens
MARKCSVPLVMAWLTWTTSRAPLPH

SEQ ID NO: 36752 - protein, 99 aa, Homo sapiens
LLAVTGGAAALSALSPPGENEPQCPPARSQPCPGQRKTTRIPGSGRRPGWAAPVRAGDSAPPLAAVSGNWVPALRGFQRTGTPFPGSPAHPAGEGGRCR

SEQ ID NO: 36753 - protein, 29 aa, Homo sapiens
LARFLLRVMLFLDYSLIWSYWAPGHQGCF

SEQ ID NO: 36754 - protein, 30 aa, Homo sapiens
LKKPQSHMWRRMTMMSWTASSIISLHHRSP

SEQ ID NO: 36755 - protein, 87 aa, Homo sapiens
KQQPLLFVSAISSAVAKQQPCVSASPSTLARLVSRLAMPAGSSTAWNTASSPMARCQVTRPLGEEMIPSTPSSVRRGLASMCPGQCL

SEQ ID NO: 36756 - protein, 65 aa, Homo sapiens
LGRRRPASTSGLLPSAACAPPAKSPPSRPHLAPPIPPGWSPLWVPIGSCECLGVGSLFLARGTNF

SEQ ID NO: 36757 - protein, 47 aa, Homo sapiens
LFCHSIKLFSILLSLHLSAIPHLPGRRTRTQDPPGGLTFRRGASWTA

SEQ ID NO: 36758 - protein, 23 aa, Homo sapiens
MILLVSLHLWTVSIKTVEIINLR

SEQ ID NO: 36759 - protein, 12 aa, Homo sapiens
INIYRMWTLSLM

SEQ ID NO: 36760 - protein, 75 aa, Homo sapiens
RGKVWRDPAPAPPPATTVGAAEEMDINPGVKSQGMKPAGAGNLGFRTLRRLLGCLTLTLSGRILNPSWVSSTGMP

SEQ ID NO: 36761 - protein, 35 aa, Homo sapiens
RDARRKSTSAASPWPALDLPFFVVFFCFSPFFLLN

SEQ ID NO: 36762 - protein, 32 aa, Homo sapiens
TPEGSQPLLLLLGLRWTFLFLLFFFVFPLSSF

SEQ ID NO: 36763 - protein, 68 aa, Homo sapiens
LFCARVKRFVPAIPWAALGKLAAWPLVWLSGLVPATVYTDWLGEETRTRKSGTKTRSLRTPQRLGLRL

SEQ ID NO: 36764 - protein, 66 aa, Homo sapiens
TQSLGLFGLLPPPGSALRCRGELSARSPWGAPHIGPRCCCCCRLCCCCCCCASRPAAASQDRETHH

SEQ ID NO: 36765 - protein, 69 aa, Homo sapiens
TQSLGLFGLLPPPGSALRCRGELSARSPWGAPHIGPRCCCCCRLCCCCCCCASRPAAASQIPRGAPPSR

SEQ ID NO: 36766 - protein, 37 aa, Homo sapiens
IGPMQTWFQKFVFFWWVQLGLESPVFSIQSSLFFMAM

SEQ ID NO: 36767 - protein, 40 aa, Homo sapiens
KVLLAGYFIDTLKVLHMIRKQLWKMTAFISLNILPYGTDQ

SEQ ID NO: 36768 - protein, 33 aa, Homo sapiens
IFLSLFDWSMLLRIILIYTWLWNMSLGVKCFHI

SEQ ID NO: 36769 - protein, 25 aa, Homo sapiens
MNLCWKIITLLWVSNCCKKNTVTSS

SEQ ID NO: 36770 - protein, 49 aa, Homo sapiens
LLHLRPEPRSAQDWNAFPSGLSWSLGLGAALLRYNSCACGFGWHNLCLG

SEQ ID NO: 36771 - protein, 24 aa, Homo sapiens
MSCFSSTCSFGSVAAAFWALGSTC

SEQ ID NO: 36772 - protein, 17 aa, Homo sapiens
MRLFPYLIIHVLLLIRH

SEQ ID NO: 36773 - protein, 20 aa, Homo sapiens
IKTVMLTFFLMIITVLNSLR

SEQ ID NO: 36774 - protein, 41 aa, Homo sapiens [sequence omitted]

SEQ ID NO: 36775 - protein, 75 aa, Homo sapiens
LVLLAFRALVLLDLLGLLDLLASLVRLESEAPRGTLDQMDHRGPQDPLGNLVAREPSRVWKAVRISCVQPTVHPE

SEQ ID NO: 36776 - protein, 25 aa, Homo sapiens
KQSAVLAGLVVSTIRISNCWVLGAC

SEQ ID NO: 36777 - protein, 19 aa, Homo sapiens
KARRSCLLVIMLLTRTETV

SEQ ID NO: 36778 - protein, 29 aa, Homo sapiens
MTVFPYAFTAVLAVEGLVLFVLLIIHGCC

SEQ ID NO: 36779 - protein, 17 aa, Homo sapiens
MPWPILSLLLPPGLFCL

SEQ ID NO: 36780 - protein, 21 aa, Homo sapiens
ISKNHGKLKSLLGLLKHLLLM

SEQ ID NO: 36781 - protein, 12 aa, Homo sapiens
MLGLFQSALTLV

SEQ ID NO: 36782 - protein, 24 aa, Homo sapiens
IQSPGIIANIIVLLIGSFTYLTLK

SEQ ID NO: 36783 - protein, 11 aa, Homo sapiens
MKIKHILLLGV

SEQ ID NO: 36784 - protein, 24 aa, Homo sapiens
MNCCALALRCLMTMESWIIVICQE

SEQ ID NO: 36785 - protein, 58 aa, Homo sapiens
REKCPHLLLSSSLTPSHPLASDPFSTGDLPLLRSSSSSFTSPPSSSLALIMLMLEENE

SEQ ID NO: 36786 - protein, 38 aa, Homo sapiens
LVYSYHLASVFLGNAAVLMHLVSFWSYSGQAFVTALWD

SEQ ID NO: 36787 - protein, 8 aa, Homo sapiens
MAILILLT

SEQ ID NO: 36788 - protein, 19 aa, Homo sapiens
IRLLCLVTAMVSARAAQDL

SEQ ID NO: 36789 - protein, 14 aa, Homo sapiens
RKRRFRHRSGPATR

SEQ ID NO: 36790 - protein, 25 aa, Homo sapiens
LKTSMMTCMCSFLVLIQKIIHKSHS

SEQ ID NO: 36791 - protein, 10 aa, Homo sapiens
IYSGYLFLLY

SEQ ID NO: 36792 - protein, 18 aa, Homo sapiens
LVFVLSLVYWIQRFHCFH

SEQ ID NO: 36793 - protein, 24 aa, Homo sapiens
ILLNLPWFAYFLFPFFFQMGKTCS

SEQ ID NO: 36794 - protein, 14 aa, Homo sapiens
IKIRSCLFILYKMI

SEQ ID NO: 36795 - protein, 61 aa, Homo sapiens
TTPLLCISFFHFLFQAFLFLPCGNSFGASDCSSSECAAIPVDPVPGACSKFSSVRPFAGLV

SEQ ID NO: 36796 - protein, 29 aa, Homo sapiens
IDDSRTSFKYTIFHSLFLLNFFILNFQIL

SEQ ID NO: 36797 - protein, 39 aa, Homo sapiens
KSPSFLCFFFSFAFSSFIFLFVCIFFPLLVEVRFPPTRP

SEQ ID NO: 36798 - protein, 39 aa, Homo sapiens
MEFCSCCPGWSAMARSQLTTTSAFFFLLFLKLVFTPRHS

SEQ ID NO: 36799 - protein, 40 aa, Homo sapiens
MRPHKPKKKTSICSSICLLWFKNFFNLTSRCVNCDIWECL

SEQ ID NO: 36800 - protein, 49 aa, Homo sapiens
LGNFRSSVLSFRPWRSMLLPKLCLISAGGAQLTGNVSPEAEKLPGKGLS

SEQ ID NO: 36801 - protein, 59 aa, Homo sapiens
LVRTPLTSVYLRVRPILPAGLCLGVTLPELAPTTVATVMLMCDCCQEPAHMTVWRKFFP

SEQ ID NO: 36802 - protein, 27 aa, Homo sapiens
TCLCLSFLSSVSTGYVSHCQIPDHKSP

SEQ ID NO: 36803 - protein, 12 aa, Homo sapiens
KCSFLTFLLQLV

SEQ ID NO: 36804 - protein, 37 aa, Homo sapiens
RVLRILIVSRGVHSPPLASAQGATAAIATSSLSQGPV

SEQ ID NO: 36805 - protein, 41 aa, Homo sapiens
KEDDSTSFSFLPSLPCPALLPLLAVVVCQHLAGDFLNLQGE

SEQ ID NO: 36806 - protein, 115 aa, Homo sapiens [sequence omitted]

SEQ ID NO: 36807 - protein, 35 aa, Homo sapiens
MVVEGALGRVVRAPDSSPMQLQNMTNVLKGRLACR

SEQ ID NO: 36808 - protein, 36 aa, Homo sapiens
LDPTMQEGRRLFPAPLATIRTCDLVKTGIKTWAYFS

SEQ ID NO: 36809 - protein, 11 aa, Homo sapiens
LHIILGLGGLV

SEQ ID NO: 36810 - protein, 21 aa, Homo sapiens
LSFFVWAPVLTVLQCSWQVEW

SEQ ID NO: 36811 - protein, 31 aa, Homo sapiens
VRVCVRVCACVHVCACVCRMMTMCLLPWGGS

SEQ ID NO: 36812 - protein, 56 aa, Homo sapiens
MSRLAAFCLPVCVTRPGVRPNLRSADCSLIDVAVNSSALGVQLVSGSETPDLFSAR

SEQ ID NO: 36813 - protein, 51 aa, Homo sapiens
MDDACSFGFAVVLLGVWSEDRAEKRRSSFSRSFFLPKRGLSTQNISGWDSL

SEQ ID NO: 36814 - protein, 34 aa, Homo sapiens
VLHRQGQVEHRMVPTIGCLAAALNVAPVNSGMHS

SEQ ID NO: 36815 - protein, 52 aa, Homo sapiens
VYHTWADTSLSSIFTKQRTRRFPRRCRWMAGGHGQAPSMPLFAPMCLAAGIK

SEQ ID NO: 36816 - protein, 55 aa, Homo sapiens
MISSVITYRASPCGLGAPSGAILMALGALLPFSIIMWTTGATAQSKTLQFLSGLN

SEQ ID NO: 36817 - protein, 66 aa, Homo sapiens
LNFSDYQRLFLRMWHLPWVQAVVLLLPMNELLHLNIREQAQSQLHYEEHLHNHNRSSKMGPLVVEG

SEQ ID NO: 36818 - protein, 42 aa, Homo sapiens
LQKALLPLSLPLSFSLFSLSYIFLLLLIHGDQMMYDKINCKE

SEQ ID NO: 36819 - protein, 11 aa, Homo sapiens
VAGAAFFMSLG

SEQ ID NO: 36820 - protein, 28 aa, Homo sapiens
LVLAAASLCCAHMTHNSGSGPGTSNIIK

SEQ ID NO: 36821 - protein, 51 aa, Homo sapiens
LMILAFPCFPIDLAVLLAVLAHSRWFCHWLPPSACLWDYATAILFYLPSAQ

SEQ ID NO: 36822 - protein, 48 aa, Homo sapiens
LAASLTGAFLTAAHGPHWSPPTASRILPPPSQAGLMSVLTLLPLLPGP

SEQ ID NO: 36823 - protein, 35 aa, Homo sapiens
VLFTIFVRGDMSNTTVSSVGFFFFFFAREFFTMLL

SEQ ID NO: 36824 - protein, 93 aa, Homo sapiens
LKSRWRGGRKKMGKCYKHSVHVVSLSAVLSSQPTSLEQVSLKHNNRHWGALQQKITSQRTGWCRRLNASLRKQKYYRSTPEPAVSPRCLSMNC

SEQ ID NO: 36825 - protein, 234 aa, Homo sapiens
MMSLTLLFCLLSFQFPFVFPARNISLKCVQDTDEFLSDLNSVKPKEYALRPFYMGLDVWILLQKSNSANLSCLAIQCMTLWGSLGATLSMETMDRLGSYMECLSTPAPKGNFRGWYCKLHILQVSVGDLHACSCRTSECHDIEQNTTVSQDGADYSVGVCVPDSCAEEDVTLMSRLGRYKTLRFRNTSFLAPSLFLFTINSSSLSGGSVTRCAAGKIPLDTFAAVCLWRLDLRS

SEQ ID NO: 36826 - protein, 13 aa, Homo sapiens
MYTHTYILIWVSV

SEQ ID NO: 36827 - protein, 44 aa, Homo sapiens
MAMVISFLIPMVCYNVTLRFFPSVNRSHFLTPCLWMGLVACFEQ

SEQ ID NO: 36828 - protein, 32 aa, Homo sapiens
MAIFFFFCIIVSSLPTAELGTENACSTCLLNE

SEQ ID NO: 36829 - protein, 89 aa, Homo sapiens
MLALFHFHLPPWDDAVRRPSVDASPSTLNFPDAELYASIFLCCMAPGEILISFLTLVQIAHANGRGCNTPACGAAACVWHENSQEERKY

SEQ ID NO: 36830 - protein, 84 aa, Homo sapiens
MLALFHFHLPPWDDAVRRPSVDASPSTLNFPDAELYASIFLCCMAPGEILISFLTLVQIAHANGRGCNTPACGAAACVWHGCPF

SEQ ID NO: 36831 - protein, 113 aa, Homo sapiens [sequence omitted]

SEQ ID NO: 36832 - protein, 37 aa, Homo sapiens
LGKHLLSILGTNMLLFPLFLLLSLDLCQKEGYAESLI

SEQ ID NO: 36833 - protein, 63 aa, Homo sapiens
LRLPARSLPTSSAHLGFWVFLCFHLFFFFLNPFSAASQPRVCECQRGIRQQSFFPLCLDPSQG

SEQ ID NO: 36834 - protein, 68 aa, Homo sapiens
LTSIPSKNKRPSETERGGLGLGSRPRCVLKVMCARFRKAAHSRFLGVSAAVGSWGQGPGCWGVGRGSR

SEQ ID NO: 36835 - protein, 85 aa, Homo sapiens
MRECSSDAVTWAGALGLASALVAARPALWSHGLPGRTPRLSPSRPQPPDDPLLPSLSPTVGLAEDGARPGPRGAAQVLGGREPGA

SEQ ID NO: 36836 - protein, 80 aa, Homo sapiens
LRGACSSLPLITVAFSWHPNLSRRSPVLGLVRRMRSLLPSPQPHPLQGQALSHPWKMVPGSQLPCICLISPDQRLSLGSS

SEQ ID NO: 36837 - protein, 52 aa, Homo sapiens
MRTPCSSSQRKHGSPKLIPQPLALLFLVPSVQKGGEGLLSGIKSSEPVSVAE

SEQ ID NO: 36838 - protein, 44 aa, Homo sapiens
VIVNWLLSVSVLYRPNKGFGPDLGFPTGGLVGCHLIIRPDYPPR

SEQ ID NO: 36839 - protein, 58 aa, Homo sapiens
VGPLLARAWTLAALLLDSHHEAPMLARSLAARRPGAKDTAVSPVPRISPPPKAHPRAF

SEQ ID NO: 36840 - protein, 57 aa, Homo sapiens
LLLYTASTLAFTFTPASSVTLGPSRQRGLWHREGWDPPRRRGGPNAALVQARRRVCG

SEQ ID NO: 36841 - protein, 50 aa, Homo sapiens
LGPRHPKPRDTCWRADGICLAWAGVLALLLLSCRATSDDRLFPLSLSFSS

SEQ ID NO: 36842 - protein, 23 aa, Homo sapiens
MEMYYSLLYLYLYHSAGLTELSL

SEQ ID NO: 36843 - protein, 43 aa, Homo sapiens
VPHVVAVLRGLLLLFLCAKDDVGGGAGSLRRCQRAPGDRWGPG

SEQ ID NO: 36844 - protein, 64 aa, Homo sapiens
MRGACRGGTAWAGSFLPPTRAPGQVSAPCPGAHRCPPSALLPLAPDPPAVPPAALPCRSTPPCL

SEQ ID NO: 36845 - protein, 14 aa, Homo sapiens
MICIYSFVILPAIY

SEQ ID NO: 36846 - protein, 32 aa, Homo sapiens
LTHLLLCWIRASSGLLLSSPRSLMDSTFPTGP

SEQ ID NO: 36847 - protein, 33 aa, Homo sapiens
LLLGSVAFCIQSLLLREAPGASATAPVTLSPAL

SEQ ID NO: 36848 - protein, 31 aa, Homo sapiens
LLSPMGMARRDLAFRVGRECTESAKDQGGCQ

SEQ ID NO: 36849 - protein, 60 aa, Homo sapiens
MTAFGLGIPTFLVMQPSGSQPRFPALTQNGVALVRTPLTSVYLRVRRPDFAMLARLVLNS

SEQ ID NO: 36850 - protein, 47 aa, Homo sapiens
IGSFFFLPSLFLFLRLVACKKITVRCSPALGARYSAPLSPVHCATQR

SEQ ID NO: 36851 - protein, 38 aa, Homo sapiens
MSWESFKSPLSSYLTILARGGFSSLPIWAHFCQPQPCS

SEQ ID NO: 36852 - protein, 164 aa, Homo sapiens
MKRVFWCLGTTILPPTLDIRGGPSHPCPPMLSLPTLGPLTHSPLSSPPPTVSQGTPMAPAPTPKGATHRVPTPKGATHRAPTHKRATHRAPTPKGATPRGHIPRAPSPPTPMDSHRSSQDKTLTHPSMETTRRRVPHPTMTTRTSLPPTGMTRASDRPSSARCS

SEQ ID NO: 36853 - protein, 28 aa, Homo sapiens
MRMKAEVCAFFFFSFLVVCTSLGMEGNK

SEQ ID NO: 36854 - protein, 24 aa, Homo sapiens
LCSLGMLLCLCIWSLFGATVDRHL

SEQ ID NO: 36855 - protein, 35 aa, Homo sapiens
LSTLDCLLQQFLGSKIVSCTSICLCLLLPTLSKTQ

SEQ ID NO: 36856 - protein, 38 aa, Homo sapiens
KKKMKMRRKRMKMKNKWLSFNDACGMCVCAQAIILLRM

SEQ ID NO: 36857 - protein, 36 aa, Homo sapiens
TRKRRRKRKKRKMLGNIYLTCSTARTLASCCYSCKY

SEQ ID NO: 36858 - protein, 42 aa, Homo sapiens
IIYNMILSHLLHLCAHTCEGLGPASTTALPQTQLSTSRQALL

SEQ ID NO: 36859 - protein, 33 aa, Homo sapiens
RRRKRKKRKMLGNIYLTCSTARTLASCCYSCKY

SEQ ID NO: 36860 - protein, 14 aa, Homo sapiens
KLEIGILISFYLID

SEQ ID NO: 36861 - protein, 87 aa, Homo sapiens
TTATLLCLLSATALLCSLGHPRPHLLRLPDLPSFPAFLWIPASGHPSPPSLQGPLLVSLLLEPLPPPPSLQNFSFTPHPPPLPPFLF

SEQ ID NO: 36862 - protein, 13 aa, Homo sapiens
LLFVCLFLFLQLK

SEQ ID NO: 36863 - protein, 59 aa, Homo sapiens
KNTAHVLCMDVTDTLFSLIFEKQARCPAHHMTPSILLLSAHFIGGIHHTWYSQSTESMR

SEQ ID NO: 36864 - protein, 10 aa, Homo sapiens
MVKRVLLLTV

SEQ ID NO: 36865 - protein, 37 aa, Homo sapiens
KTSMAPMDIVSIVGAEKLEAMTMSTILSKKKQCLRNI

SEQ ID NO: 36866 - protein, 22 aa, Homo sapiens
VVAKRSSERFRKLVVALKITLR

SEQ ID NO: 36867 - protein, 21 aa, Homo sapiens
MNRHNPRSNHFTVYHRSQVCR

SEQ ID NO: 36868 - protein, 23 aa, Homo sapiens
LLACASGLALSPDSRCKGALCER

SEQ ID NO: 36869 - protein, 29 aa, Homo sapiens
MQTMTILRAPGNRTQNSSPENPDANSLKW

SEQ ID NO: 36870 - protein, 20 aa, Homo sapiens
IQRRGEESLVYVLLMYTTGS

SEQ ID NO: 36871 - protein, 44 aa, Homo sapiens
LPVALTATLASGAGHGRPPPDRPAPVLTALALAFEPEASSARTT

SEQ ID NO: 36872 - protein, 32 aa, Homo sapiens
MGLCWMRVLLTQVYTSISGQQKRRMTQAWCIK

SEQ ID NO: 36873 - protein, 9 aa, Homo sapiens
MFLCVLHLL

SEQ ID NO: 36874 - protein, 58 aa, Homo sapiens
MSLSLTVVSFHTISLVWLGKNLRCYILASQTGDSRKGVIFLYQSNASRGRSYICHFTA

SEQ ID NO: 36875 - protein, 45 aa, Homo sapiens
TFTFLHRNNGRTQGVAFWSQGSSGCPAPLHPHSPLLLPTASPLGR

SEQ ID NO: 36876 - protein, 19 aa, Homo sapiens
LGTRRQETLFLLSSFLLVG

SEQ ID NO: 36877 - protein, 33 aa, Homo sapiens
MRQLPAGLGSLVCLGCEVGRLATVFFSAQDAAG

SEQ ID NO: 36878 - protein, 24 aa, Homo sapiens
MLWLPEVLLAFLEVRSREKVNWDN

SEQ ID NO: 36879 - protein, 33 aa, Homo sapiens
MDLLLLMEMRLSHISLAPLWNLRQPPPQTLTRL

SEQ ID NO: 36880 - protein, 134 aa, Homo sapiens
MAAAGGGSAVEPRRGGRHHRCPQSARCPAVRSGPLLQTRCPECAGAARQVLALLARPRRRGPGSRSPTPTSAGPACPLFWFHLFCIFMLACYIPWPLSVLWQFPKHLGKKELGQLHNRFIGHFLAPGTAIRNGG

SEQ ID NO: 36881 - protein, 27 aa, Homo sapiens
MASPLHLEDAIWRGQGRVADPLQAPAL

SEQ ID NO: 36882 - protein, 100 aa, Homo sapiens
MPPLQPSEERSYPDGPNAPGIDGVSAALSCSGLVCGITARKVLRGNPLHAVWCVKNAASSSLLLFFAEKQNSRAQGNWRGEKAVSWSPGAVSLHAPLLGL

SEQ ID NO: 36883 - protein, 18 aa, Homo sapiens
MANSLLMTGLDYTSCWPS

SEQ ID NO: 36884 - protein, 53 aa, Homo sapiens
MTPVRTSCASHSTVHWALCRTEKRKRVLRVPLAVITSSGCLCLTLGCRLHPAS

SEQ ID NO: 36885 - protein, 55 aa, Homo sapiens
MSATSLQIPKPSSSMNQISSSSHFYQRSNCFSFPLTWLCIRTGYRTLGPEVLERM

SEQ ID NO: 36886 - protein, 55 aa, Homo sapiens
MSQELPAAGHTTAFICALGPGLLLSLPSIGAQHPLPAHPSDSNSSPAPRPCVHFS

SEQ ID NO: 36887 - protein, 15 aa, Homo sapiens
LSLVFYSPWLLLISR

SEQ ID NO: 36888 - protein, 37 aa, Homo sapiens
ILTLPLSSRTTFGWTSPSLLAGVCGGAMGRTSTSLRH

SEQ ID NO: 36889 - protein, 30 aa, Homo sapiens
LPLNGDFRRMLSLPGMPRCYFGKADIPRKQ

SEQ ID NO: 36890 - protein, 18 aa, Homo sapiens
TSFYGQKVPFSSSASVVA

SEQ ID NO: 36891 - protein, 24 aa, Homo sapiens
LRLSVRMILSPRFDLGSPHGENCI

SEQ ID NO: 36892 - protein, 53 aa, Homo sapiens
LGPALLLAPRSLPGHRLTRCLLLGETSFLPATAAASATGHRPCPGSPLAQTPT

SEQ ID NO: 36893 - protein, 48 aa, Homo sapiens
LLLLTSALRLFSIGVEAPPVLSCLWREANLPLDQREEKAETGSNAVDW

SEQ ID NO: 36894 - protein, 54 aa, Homo sapiens
MAPESGGSVASLSLSVADAMVSCLSSWSGLDQCLPGRQVRSWEVPAVLHAELPL

SEQ ID NO: 36895 - protein, 32 aa, Homo sapiens
LPSFVVSQRCAGLLLAALRIQGVGCQVQDLQL

SEQ ID NO: 36896 - protein, 73 aa, Homo sapiens [sequence omitted]

SEQ ID NO: 36897 - protein, 15 aa, Homo sapiens
ISRALAELHLLAFLA

SEQ ID NO: 36898 - protein, 129 aa, Homo sapiens
RMSEHRNEALGNYLEMRLKSSFLRGLGSWKSNPLRLGGWTILLTLTMGQGEPGGPQGDPWVPHELLLPSLCDSSHASSWGSGSITCAWRGGDSSSHPLVSGHILSNSPVAAVMCSSMGTHLSPFKGTLL

SEQ ID NO: 36899 - protein, 53 aa, Homo sapiens
RSRRMDLLNDLALFSGPIYHIPFLLQIFLLSPFLWDLSCYIPSELTNAFTFFP

SEQ ID NO: 36900 - protein, 49 aa, Homo sapiens
LEPTPTSQTGQGAHPFMLLWLLMLGRSASFCSVADKLQWTLAQRTGPHP

SEQ ID NO: 36901 - protein, 114 aa, Homo sapiens
VASCKESLRGPKSAALLLAFASSSSRFPTVKSQRHLQRPPGPTETDPQRLARSCLLHREPPSTGEGLAGGVGRWRRRHGEVPEGRPGRCRSYVTLPLLHGPVSVRRWETRRPNP

SEQ ID NO: 36902 - protein, 25 aa, Homo sapiens
MPGPVHIALLASLNPHSFSLGSLWV

SEQ ID NO: 36903 - protein, 56 aa, Homo sapiens
MWVQPWEHCGSASQEPWRSRSLKTQWWHWWAPMPPCAAPSPLSLASAWHSSTSSGS

SEQ ID NO: 36904 - protein, 29 aa, Homo sapiens
ILFLSPQLLLTRRPPAASATPPGRFHRIS

SEQ ID NO: 36905 - protein, 35 aa, Homo sapiens
ILIPSPPHFFNQVSLLLPFFFLLFSLIYYESGAEV

SEQ ID NO: 36906 - protein, 237 aa, Homo sapiens
KNIFQLVGLDLFVFPYRVVATAPGCGVIECIPDCTSRDQLGRQTDFGMYDYFTRQYGDESTLAFQQARYNFIRSMAAYSLLLFLLQIKDRHNGNIMLDKKGHIIHIDFGFMFESSPGGNLGWEPDIKLTDEMVMIMGGKMEATPFKWFMEMCVQATWLCGEPGPYMDVVVSLVTIMLDTGLPCFRGQTIKLLKHRFSPNMTEREAANFIMKVIQSCFLSNRSRTYNMIQYYQNDIPY

SEQ ID NO: 36907 - protein, 46 aa, Homo sapiens
LPPALTLPLVCCSSRSAGPETLQQGCGLLVHRRHHLHIALWIPPIL

SEQ ID NO: 36908 - protein, 91 aa, Homo sapiens
RNSEEFVQCHSPVINGTKIFLLMGQDGIVKWLFTVNCNTILFMDLFAYFSLHRETFLPWLRTHSWIEPTGELSGKHLANFFFFEMESCCVA

SEQ ID NO: 36909 - protein, 70 aa, Homo sapiens
LVIWSFFFFNFKILRQALTMLPRWSQTPGFQRCSCLSLPKGWDYRCEPLCPAHLYISFGEYLGSFEGSCI

SEQ ID NO: 36910 - protein, 34 aa, Homo sapiens
MAMLMLSMVSLLQTFIYTLREKNVSAVTGSCFGG

SEQ ID NO: 36911 - protein, 30 aa, Homo sapiens
RKRFKYYAVATGFLLWNVCICWLVLPQLCY

SEQ ID NO: 36912 - protein, 59 aa, Homo sapiens
MAFMLLILNTASVGKEAFVFDLSIRGSSHRNARGKRTLPYSHLMLQTMFMVIHTFQNEP

SEQ ID NO: 36913 - protein, 46 aa, Homo sapiens
LGLTCLFLLLATSQSQDGCCDSGSCPNSRQQEGHGAAPASSCLPIP

SEQ ID NO: 36914 - protein, 32 aa, Homo sapiens
LQSWKREGLKGPLYIFCLSLSLCVLIIICVLI

SEQ ID NO: 36915 - protein, 114 aa, Homo sapiens
ILSSRLGTPGSLTAAAAASASRTIGSLGNNSGGRPQRGSGSPCLRGSGDSSRPPPPGRTASVVPACNASAGEWLLLCPSWGPSQDQSANSIPPAGRSRGAGTKPAASSRADPGT

SEQ ID NO: 36916 - protein, 83 aa, Homo sapiens
RTKSHGHADRVPRETVSVGMCAWLCTWVCSARESTWRLLGAMFGEGGVPAAWRASVPVAPCPGTAACTSRAAFGGWGFCHFRV

SEQ ID NO: 36917 - protein, 65 aa, Homo sapiens
LEPARRSGRPRLCPLLLLTARARGTSSRGCFGCRGRWSLWILHGTSWLWPSPARPCFPFLTSRTI

SEQ ID NO: 36918 - protein, 48 aa, Homo sapiens
IWWVYQGFLLLLLPQFLLLPPCKKDLLPPTMILSPPQPRGTISGGFFK

SEQ ID NO: 36919 - protein, 29 aa, Homo sapiens
KSKAKSQGSPWLMYLGLLWSTLPSCHPVE

SEQ ID NO: 36920 - protein, 50 aa, Homo sapiens
LDVAVLPKLFSVEDVLEGSSLSMLDFQWQLQWPFMWLAVSLVVTSTQLCL

SEQ ID NO: 36921 - protein, 54 aa, Homo sapiens
RTKSMTSRWRSRICGWRTMGVTAVRSLTGWRMKAVWWSWSCGDGAVCPHISPTC

SEQ ID NO: 36922 - protein, 34 aa, Homo sapiens
MRLTACGSWSCVRSVRSLSPRKPWRSTASLSTSR

SEQ ID NO: 36923 - protein, 40 aa, Homo sapiens
RWGYGPWHYSTPGRKIWAACCLVHLCLFAEAESLAAAGSD

SEQ ID NO: 36924 - protein, 144 aa, Homo sapiens
VAPLAGRSPWGSVVQATLRLLQPSPRGLCSGAVVFRLGLRPRLGAACSGSIFPFLPPLATSPYGVRWQRRFLGRPGFNLSGGPPGTLLPLRRRGERRRDRRPPPDLPGEGPAGVRLGTRKLGGVRGLPRGPCGGGVRTADRFIA

SEQ ID NO: 36925 - protein, 44 aa, Homo sapiens
MMTMQASSLLNVILFMSVRVLVLWRSRFCGHQVPGVQSSSPLGQ

SEQ ID NO: 36926 - protein, 26 aa, Homo sapiens
MFAKAAKIPAGKASSVMKRNSKDSTE

SEQ ID NO: 36927 - protein, 40 aa, Homo sapiens
LSQAWVCVSFLFLLSLLIALTNLLGSLLELTWCWIFSNCI

SEQ ID NO: 36928 - protein, 9 aa, Homo sapiens
MVLFFLKLW

SEQ ID NO: 36929 - protein, 13 aa, Homo sapiens
LQVEIVLFFLKLW

SEQ ID NO: 36930 - protein, 32 aa, Homo sapiens
LELEKQIQKLSSMTFLLFAFGLASFIFLIHRG

SEQ ID NO: 36931 - protein, 32 aa, Homo sapiens
LGLSLPLPCLGLTLPGVQIRPGLPVQRVVVND

SEQ ID NO: 36932 - protein, 14 aa, Homo sapiens
MAQAFGGTGRQTWE

SEQ ID NO: 36933 - protein, 52 aa, Homo sapiens
LSLCSKTVNSLLSLLHLFHSFSHCVTALQRPGSWRGTLGVASLLFAYTEKAM

SEQ ID NO: 36934 - protein, 16 aa, Homo sapiens
LGLAEVEDLLLSRPRN

SEQ ID NO: 36935 - protein, 96 aa, Homo sapiens
MARSCLSGKVGSVRPDMEKGLGHRQILPSQSGGGGLGRGTPPVGAKSKKKMTLISQPRAGRKGGVGGSGTLPVLSHPHSPGPQSRSHKGCESPGIM

SEQ ID NO: 36936 - protein, 29 aa, Homo sapiens
MAMRWARACRVGLLGGSGARPGGYPPLPA

SEQ ID NO: 36937 - protein, 127 aa, Homo sapiens
LMSWQHLSPFTPGPEPGQPTMGMLCFCSPSFTMPVSSPPRWGLGGMDRQRMSSTQGLQDLPVAHSARLSTTTPAKEDSIWQSFFQVPSYTCASAFLSWMMVFSLFLSLLSLTALVFHVAHPLSSVNL

SEQ ID NO: 36938 - protein, 31 aa, Homo sapiens
LLLSLARASSRAKTMKWTMIYEALSEQMSCK

SEQ ID NO: 36939 - protein, 56 aa, Homo sapiens
MAPLPPDTWSLPRPKCIGRPRDGGLLVIGGVSGGVVGGFYLLVGLSLLFKKRRGCL

SEQ ID NO: 36940 - protein, 134 aa, Homo sapiens [sequence omitted]

SEQ ID NO: 36941 - protein, 82 aa, Homo sapiens
LWPDLPVSAQQALGTPRWELLRAALVLGSSRVSCALMLLLPSPGGGAGPVSWNWTDLGLFTCPMGAGAPILGSQPGNTKDSL

SEQ ID NO: 36942 - protein, 35 aa, Homo sapiens
LGSAHHAPLMFAVWRALSLAVETSVTLGRVYFFDG

SEQ ID NO: 36943 - protein, 64 aa, Homo sapiens
LRQKTSAAFSMGCSTFFIAHPGNSQASSICILAAACTLGDSGATVWDRAHWQGTGGCWQASGHG

SEQ ID NO: 36944 - protein, 26 aa, Homo sapiens
LPQMQKETIAIIITTIIIFLLCRWKG

SEQ ID NO: 36945 - protein, 78 aa, Homo sapiens
MERKRQSQLPVSVAEALGVFGTSAPGYRETPSCPHVGHLPDRRDRLGIQNSDRLSIPCKFHLFVTVLFSLVHATSLQS

SEQ ID NO: 36946 - protein, 36 aa, Homo sapiens
VESLHAVTDVSSGSVIFCILFGFAKIVNTVLFYFLK

SEQ ID NO: 36947 - protein, 51 aa, Homo sapiens
MAASILKNSKIIHRLLSLPCLCVCASVCACVCACLGARVPALCERAGGECV

SEQ ID NO: 36948 - protein, 25 aa, Homo sapiens
MGLRKPPGSLLLGFLLFCACISVDS

SEQ ID NO: 36949 - protein, 17 aa, Homo sapiens
LPVELVFLFLYNVCTLN

SEQ ID NO: 36950 - protein, 74 aa, Homo sapiens
LTIVKFSLPCGSPYHFMMCMGHTLFSPLWIKVVTGSLLPYASVAHTKKPGLFTAATIHPFWQTLHLSSVREKMI

SEQ ID NO: 36951 - protein, 29 aa, Homo sapiens
MLLLAACAFVSSSFKRPHRQTAFHPQHRH

SEQ ID NO: 36952 - protein, 48 aa, Homo sapiens
LEQFQIFRLPPRIFVLILSVGWISNICTCEKKKGGKPYTMINKFPSLP

SEQ ID NO: 36953 - protein, 24 aa, Homo sapiens
MQHRRLPFSVVLLPQFVESGVSMQ

SEQ ID NO: 36954 - protein, 37 aa, Homo sapiens [sequence omitted]

SEQ ID NO: 36955 - protein, 34 aa, Homo sapiens
MIYRQPFIKVDQGRTRWLNVCNPGTVGGQSGRIA

SEQ ID NO: 36956 - protein, 107 aa, Homo sapiens
LSGQPLESLGAALLLTSHTFASSLCSQLEGHECPWAVVSGRGPDTATLLPGGRGADACLILPEDGATGGCGIRAPCPALCLPAQAGHSAGRPPSAAHRGQPCGQEPL

SEQ ID NO: 36957 - protein, 56 aa, Homo sapiens
LSPSLPSPVFVLSSAGARAPTAALGGFSCSAMVAQRFCYSRAPASSQVYPELQMGV

SEQ ID NO: 36958 - protein, 29 aa, Homo sapiens
LIWKTLLNFCYQLHSVMLTLPVHSMVVRS

SEQ ID NO: 36959 - protein, 66 aa, Homo sapiens
VSHRSWPEISSLLCLLSVIQLQKKLPRKPGPRVKRRNGHKSPVFLHSVGFMHLYPIKCPWTKPETR

SEQ ID NO: 36960 - protein, 33 aa, Homo sapiens
LVYTLPGPSGPPSRSGAGGWGLGCWLCFLWVFN

SEQ ID NO: 36961 - protein, 27 aa, Homo sapiens
MMRSQDLTGFAVCWGQLIILLILDSQP

SEQ ID NO: 36962 - protein, 54 aa, Homo sapiens
MASLMSWEPVLLGKVTSDLMGAQMCVCLSVCLCVCVHSRPLTASKPGVASRPCH

SEQ ID NO: 36963 - protein, 57 aa, Homo sapiens
LGLLLLALLLPVQVSSFVPLTSMPEATAAETTKPSNSALQPTAGLLVVLLALLHLYH

SEQ ID NO: 36964 - protein, 111 aa, Homo sapiens
LVPQSFGNLLYQQSDACCRALAKSHANGYGDRGTHCLLPLCPHHCCSTNAPPEEAELRQDYQFWSFIRESSGSSSLFCFEGFHTLLFSGSTIITFFSLSLFGLCWDLRIRK

SEQ ID NO: 36965 - protein, 52 aa, Homo sapiens
MPASAQGRAWPALLRGPLWNALNKARARTPGACAALVANISSAGPQDKWYDQ

SEQ ID NO: 36966 - protein, 33 aa, Homo sapiens
VLHLLLCASQLLLLKQLSLLFGFLRLLASERHL

SEQ ID NO: 36967 - protein, 41 aa, Homo sapiens
LSNRALESAAWVQHAALPWTICLSCIYDLPVLLSVSPFLIK

SEQ ID NO: 36968 - protein, 12 aa, Homo sapiens
IKISFTVMLLLT

SEQ ID NO: 36969 - protein, 24 aa, Homo sapiens
MLAVAGAVIFISSFLKHRSRNGSK

SEQ ID NO: 36970 - protein, 14 aa, Homo sapiens
LIYTLRIVDFFFLF

SEQ ID NO: 36971 - protein, 12 aa, Homo sapiens
IIVVVLNLALRA

SEQ ID NO: 36972 - protein, 74 aa, Homo sapiens
LQLKPLPLLQAPPGPADHSSPQQWSHMTPPTWTLSSDTLSSRLFTASSLCSGSLLMATCCGSLPACTLARNSMR

SEQ ID NO: 36973 - protein, 33 aa, Homo sapiens
MNKARNSCLFSVLPLLLSLTTSVNITSQLLLQL

SEQ ID NO: 36974 - protein, 71 aa, Homo sapiens
LDRLLHIRPRNGPLEKGFFKPAALSSVLASGIAFPGNLASDIAHHPALFTVPGSSWRNDISENADSYVHVI

SEQ ID NO: 36975 - protein, 41 aa, Homo sapiens
IFLWLLTGSYYKALCMDTIFLYYTRKECTYHTQGEKCSFGC

SEQ ID NO: 36976 - protein, 29 aa, Homo sapiens
MWLPQRQVFSCVVASPSHSTGCPDAINIC

SEQ ID NO: 36977 - protein, 19 aa, Homo sapiens
LWGSLCPLLFHCFQLVVVG

SEQ ID NO: 36978 - protein, 24 aa, Homo sapiens
MLWRLCCFALSTAYSSGPHCFYEL

SEQ ID NO: 36979 - protein, 14 aa, Homo sapiens
IFSLFISVVTAFAV

SEQ ID NO: 36980 - protein, 36 aa, Homo sapiens
MCPISLFSVLPPYPSPSSAWKRTMAWTSASPDSCSP

SEQ ID NO: 36981 - protein, 59 aa, Homo sapiens
RMLRCPPKWIASYLVPACCRLLHLVPLGTHCAANSSRQIHWEAVAHEGISETFFCDLAV

SEQ ID NO: 36982 - protein, 14 aa, Homo sapiens
LIFRSFSVLLSVVV

SEQ ID NO: 36983 - protein, 104 aa, Homo sapiens
VKGVGFFLCVCVCVSGEIFHYECFTKVNFFLFASFVFGSFFFLPNFGFISRRIWLWGKRKKSRITRSTTTNNNKNHQDIFLQISDGFKFMKQLSPFAISIWISE

SEQ ID NO: 36984 - protein, 17 aa, Homo sapiens
MGPCALLTWAVLVFKPA

SEQ ID NO: 36985 - protein, 86 aa, Homo sapiens
TRPHPAARAALSSAASALGAFSQKQSRRARWFLSARKSPELTTGRSATARGPKPQKDDGRVMKLSPGLLGRRECAGAAWERREECR

SEQ ID NO: 36986 - protein, 43 aa, Homo sapiens
LSTFVAIGFPPPAPASLILGICVRSHSQSRQPRRRRKAGYQQF

SEQ ID NO: 36987 - protein, 42 aa, Homo sapiens
LFATFISVDFFFLVCVVVVFKCGGQKEIPSQAQSNPSPKRLF

SEQ ID NO: 36988 - protein, 17 aa, Homo sapiens
MKLVFILTADTLLSIAD

SEQ ID NO: 36989 - protein, 34 aa, Homo sapiens
LLGLPAAGASTLCVCLAAAVACSDWLLGPSRSEH

SEQ ID NO: 36990 - protein, 57 aa, Homo sapiens
VCSEMTSLSRCCRRCWGWSLSSGFWAMALPCGFSVSTSSPGNPAGFSCSTWQWLTFY

SEQ ID NO: 36991 - protein, 52 aa, Homo sapiens
VCSEMTSLPRCCRRCWGWSLSLGFWAMALPCGFSVSTSSPGNPAGFSCSTWQ

SEQ ID NO: 36992 - protein, 45 aa, Homo sapiens [sequence omitted]

SEQ ID NO: 36993 - protein, 28 aa, Homo sapiens
MLDFQWQLQWPFMWLAVSLVVTSTQLCL

SEQ ID NO: 36994 - protein, 66 aa, Homo sapiens
ILAFSRRSSPVVGSLAWLSPAGSNGQAPVVSGLSASSCVAPSSWPTCVETGCSRWWDTLPWIQTLI

SEQ ID NO: 36995 - protein, 36 aa, Homo sapiens
MLTIFFLPLATSLPTCFLSTLVQLFLQRPRSSELHI

SEQ ID NO: 36996 - protein, 56 aa, Homo sapiens
MPVKARALVFLFLWSAAEMTATAPSQYIYMSFLWTSAPFKIKAGTQMWGWKWSSPF

SEQ ID NO: 36997 - protein, 34 aa, Homo sapiens
MSHHGRPCITPLCSLPHAAQPELHSQVSGASLLI

SEQ ID NO: 36998 - protein, 18 aa, Homo sapiens
LFLFLAAAAGLVVLHLRG

SEQ ID NO: 36999 - protein, 66 aa, Homo sapiens
VKLLFLAPAWHRKRAPSPSLGFYVDTVMPQFSFFLFVFDTGSHSITQAGVQWHHLSSPQPQTPQLG

SEQ ID NO: 37000 - protein, 37 aa, Homo sapiens
LSACVCCRVLSLHWCASGQAALLGPGPCLPTPPPSWA

SEQ ID NO: 37001 - protein, 31 aa, Homo sapiens
MRAGIFVCCVLCVPPVPSQCLADGKCSTHIG

SEQ ID NO: 37002 - protein, 55 aa, Homo sapiens
LLSLCQRKIPWRMPHNHLEGDALLRVPVLCIWRAWLRAEVGGRAPLPGRSVGHRN

SEQ ID NO: 37003 - protein, 29 aa, Homo sapiens
LGSLERGLLKITAAAFGLGSVLSACARTG

SEQ ID NO: 37004 - protein, 95 aa, Homo sapiens
MFPRHHRRKLRRLTALTSAVNSAHLASGATPASAVTSTTVATGWRSLVGTTNTSMSAVAKISSTSTTCSGLPPSSTLLACSWASSLPLSLEALRT

SEQ ID NO: 37005 - protein, 45 aa, Homo sapiens
MRKRKRKKRRRRSHPQNLLSWSTISPTNSKITSSRSQSSVMSVPG

SEQ ID NO: 37006 - protein, 72 aa, Homo sapiens
MAIKGLSFLLICLDKQQSPFGCLLVRIFLKVSCTFPCFDEWNGRAGFNCLMATVLGKCQNLHVSHPRATGRV

SEQ ID NO: 37007 - protein, 16 aa, Homo sapiens
MLNFLILTFLSFSRLF

SEQ ID NO: 37008 - protein, 109 aa, Homo sapiens
MTNPFQAWFKLKLKLCLRFSSREVLIVSWLFLVYWLRNCALEGRGVLRMGQLMEGEWKTLVAQENMSTSVHHCNSGLIIIFSASVSTNETMPLNHILCCLQYFPPLRHL

SEQ ID NO: 37009 - protein, 43 aa, Homo sapiens
VKTTKKTMAFIWTDKMKEREKAVVCRQIWFGICLLMTPDMMSF

SEQ ID NO: 37010 - protein, 49 aa, Homo sapiens [sequence omitted]

SEQ ID NO: 37011 - protein, 26 aa, Homo sapiens
LTTSFLSFFCFFLPAVISVSSFCHTA

SEQ ID NO: 37012 - protein, 105 aa, Homo sapiens
LRSPGHGSVASTPLCPRPVSALTTPALSAPTFFLQPRPPPPLLAAAMESSTFALVPVFAHLSILQSLVPAAGAASPVAISAQHLCYSHVTPGDPGAGAGQGPAPS

SEQ ID NO: 37013 - protein, 81 aa, Homo sapiens
MWPLQHISVASVSVVSFLCLAPHGFKSTRAGVETAHLALILSDWWFWPVSRYLSIGKAALRCGGHPDSHRLHSRNGSMRLY

SEQ ID NO: 37014 - protein, 69 aa, Homo sapiens
MGTVKAQKEKRFLFWWGFVSEFWPMEPRGGLAQNISLWILSSGNWMPTRRVILESCVGDHKAFVSQVPE

SEQ ID NO: 37015 - protein, 66 aa, Homo sapiens
MPEDLLFLDAAAQGLYFMLWLLSFELSVAVSELLRFTGPWRILSYTVHWVLDMQSVPFIAFLENNN

SEQ ID NO: 37016 - protein, 57 aa, Homo sapiens
MSLQALSRASSMRTAFSGAENAWITSARTTARQKHPREASRVGVGEQTAGPAESARN

SEQ ID NO: 37017 - protein, 47 aa, Homo sapiens
MPRAAAPSVAAAAAGAQGAAAAVRWGRQREAAGRAAGAGAGGAARPA

SEQ ID NO: 37018 - protein, 40 aa, Homo sapiens
MPSRMSNLSATRQVFLWSLGQATCLFYCKSCHEILRCEIG

SEQ ID NO: 37019 - protein, 34 aa, Homo sapiens
MPPAARWPGPQCPKRVFMLFPTALMVPSDRLALL

SEQ ID NO: 37020 - protein, 119 aa, Homo sapiens
MTGDFFRVWLLQHTGLRQHPAPAAWAAPVTAGARSLQSVSSAAASVNLNQRHLAAFSATLFRSGSKPRDQETSCLSAGTQARRQEARLTPCLRLPEERAMRKAGLSSQDTREKPQATAP

SEQ ID NO: 37021 - protein, 82 aa, Homo sapiens
MSSGGRMQRMGRLRPWLCVPLRVGAGLGPNSTAAGFSLISEPRRWQSGRPGQVNPRAAGAQAPTPAQRGRKGPPPAQRAQRP

SEQ ID NO: 37022 - protein, 43 aa, Homo sapiens
MNLIKKRKSSPTLSFSAQNPIRKTCSGPLSSLTSPTRGESGIL

SEQ ID NO: 37023 - protein, 22 aa, Homo sapiens
MRPFCLQPPRPPAYRSRPAAPC

SEQ ID NO: 37024 - protein, 28 aa, Homo sapiens
MFISLWFICPRIFTAMAGTKGKRWSPTS

SEQ ID NO: 37025 - protein, 78 aa, Homo sapiens
MSLLSLAVASVCEEAGAGEWEPMTPRLTAMSTCAHSFRPQTSRDRSKLHHSSPPGLALPRRLSGSCCPVRAPAPERPH

SEQ ID NO: 37026 - protein, 24 aa, Homo sapiens
MYPTFKPLSVQLAKFPAEDSLSDG

SEQ ID NO: 37027 - protein, 25 aa, Homo sapiens
MEHLLYILGSVLGHENEVINRSLSL

SEQ ID NO: 37028 - protein, 68 aa, Homo sapiens
MIQPLQRPPAATPAACAGAAAVAAPGTKSGGARGRPPGRASCSPSPAVKYVPRQVLRRCRAGRSLLTS

SEQ ID NO: 37029 - protein, 97 aa, Homo sapiens
MQKSPSSASLTLGAVDQSCSYSAILAPYSHYLLELWLRHYNRALSPLSKSWEMVIVNASPILEAPGCRGPQLDPSHPWSLTLDLSQKAEKRSSLESL

SEQ ID NO: 37030 - protein, 57 aa, Homo sapiens [sequence omitted]

SEQ ID NO: 37031 - protein, 14 aa, Homo sapiens
MEMVYLMLKMSLVF

SEQ ID NO: 37032 - protein, 23 aa, Homo sapiens
MRAWLTATSASQLQVILLPQPPE

SEQ ID NO: 37033 - protein, 56 aa, Homo sapiens
KCPHLLLSSSLTPSHPLASDPFSTGDLPLLRSSSSSFTSPPSSSLALIMLMLEENE

SEQ ID NO: 37034 - protein, 84 aa, Homo sapiens
VLHTWVSLPRAVCSGSFGPVGGCGAAGVACAVRPGILPVMEAAAAAAAGSRCAPSTAAREVGKFAARRPKARGAAPLCRELSPI

SEQ ID NO: 37035 - protein, 16 aa, Homo sapiens
MKTRKQIRLCIIGWFL

SEQ ID NO: 37036 - protein, 34 aa, Homo sapiens
MQNFFNLRLNTFLFCFILNDEPSCPPFPLFCPPT

SEQ ID NO: 37037 - protein, 53 aa, Homo sapiens
LLIFFSWCVWWLFLSVEGKRRYHPRLSPTPLQNGFSDTPGSEGVGSPGCARSK

SEQ ID NO: 37038 - protein, 81 aa, Homo sapiens
RKYQSLCKQSLVYSCLHQSTVRFMKKNKLRTTLYVHLQMPQLMLVGCLSAFCDNEHMDFCLLNSVDPFSQLPGAWIFTSNC

SEQ ID NO: 37039 - protein, 135 aa, Homo sapiens
LLPLPGWSPTLVPLLPPCLHNFSLFCTTGSLTPTSSLFLTCLGAPLYGSIFSSMCPPYLSPFFSHLPLFPCLFSLTPCRVLAAAPGTPGVPGVQAREVTAHDRGEAPGPVPGWGLLGGRSAQSSKVSLRAPQGPG

SEQ ID NO: 37040 - protein, 46 aa, Homo sapiens
MTSASCTQPASGVLSCGWAQPPSSTMVRVRQVDGQDGIEPGRAGGV

SEQ ID NO: 37041 - protein, 97 aa, Homo sapiens
LSSWMRFLISIICTWRFIQERITGADLNHGAHKWGGCSSGHGKNFLLQLETAFCVAGYHADSTNTNPHLDAVQTPDVPPISVSLGNVSMTERLKDRV

SEQ ID NO: 37042 - protein, 90 aa, Homo sapiens
LTVTICCVHNLSVFFFLFSFPPGVSSLPWFLGSPDAPGGSCCSHRKLFDHLCSPLRQPFSLQSWGRLIYCCRHPIFIGGDAVCHLGPGSG

SEQ ID NO: 37043 - protein, 22 aa, Homo sapiens
LARLVRNCGTRRWARARCVPSS

SEQ ID NO: 37044 - protein, 27 aa, Homo sapiens
MTGSTLTSTSCGFVFVATWSGPRPGLR

SEQ ID NO: 37045 - protein, 191 aa, Homo sapiens
LFFLFVCFPPFAPGSCAASSCKAVCRGRARPSPLAATPPRGRAGPEVARGAGGASPSERRERRQRSRTHSAAGRHQLGRARTRTRRPARRGPARARVGGGGRRGAAASGGHAGALLRVQPQLPGSGALPRRRAELLPRGGRGGRGRLHRHAGPHERVLAPCARRAVPGRHGPRLRALHAAAAAQGHGEAAL

SEQ ID NO: 37046 - protein, 68 aa, Homo sapiens
VTRSPVRSVVSFVCLLGQLSLCLLCVLESRAQRKCKRVLRQRGEPLRGAVGDSSAVIRVAGELFETPS

SEQ ID NO: 37047 - protein, 89 aa, Homo sapiens
LFSANPVNASPWGRCRSRRGRGNLPLGHPVSTAFSSGDSMELSLAVLEAVCQCLLGLWLLFWLDKEVAVFVLLLWLFTDLTDVTGDECR

SEQ ID NO: 37048 - protein, 28 aa, Homo sapiens
MIDFFSSALAFFLGLAPPKPLQKRELFL

SEQ ID NO: 37049 - protein, 96 aa, Homo sapiens
MPTIATLAPTTSTAAPTTASQAPPTSQLSAGRITEKVSEDSVPRLAGTRRAGRLAGIDTNTGENLVSEQKIQDQEDHEKRGDAPGAQSQLQRPNGV

SEQ ID NO: 37050 - protein, 22 aa, Homo sapiens
VLLFLKLLKFVGFSLFLSLLEQ

SEQ ID NO: 37051 - protein, 29 aa, Homo sapiens
LNERGQRMLPMLPLFIVSPGGSHVLEEGW

SEQ ID NO: 37052 - protein, 34 aa, Homo sapiens
VVPFISASSLVLCVRYVCVWCFCFFVFFFLRFAN

SEQ ID NO: 37053 - protein, 77 aa, Homo sapiens
LFRPRQRFLVTQALMSRLSLIILLRMSGASVLCALGLHTGGATNSHCPGLLVDSPRHRCRNLPIQCTKSSLTWCGPT

SEQ ID NO: 37054 - protein, 176 aa, Homo sapiens
VPSLLLAGPGAAGAGAAPLPPAFPPPSPPPPPPPSPNHPRSHNRFRLAGVPRKERQGRKRQQGKPRGGEGEREGGAQRRGPAPQLHVAAAAAGLWGQRAAAPGAARSGTDCLILRQGPGPQLARINSRPAGPELQGRAAAAIPTTPPARPHGALSRVLSTGGPAEAGTQDLQRNAS

SEQ ID NO: 37055 - protein, 42 aa, Homo sapiens
LQGGAGTEPVPGACIGLEVGLGLGAGASLPLQLTSVVLPLGG

SEQ ID NO: 37056 - protein, 29 aa, Homo sapiens
LLSAWAAALLGSGGAGGVGRGCPRPAPPE

SEQ ID NO: 37057 - protein, 50 aa, Homo sapiens
LLPQEHLYTGLRSSMLFLVKQALLCPGAAILSHLRFCLKGFFGKTFSLSP

SEQ ID NO: 37058 - protein, 58 aa, Homo sapiens
LLAGLLALSITPSLPPSLPPGGRGGAGEAVKRSGPALEECGSDKGTEPSAVSPRFKQH

SEQ ID NO: 37059 - protein, 35 aa, Homo sapiens
MGTRSRAAVAAVAAVAVAAAGKQLTGRRRRRRWRR

SEQ ID NO: 37060 - protein, 58 aa, Homo sapiens
VPAWCLLACGLPAHVHLAAVGTSAGPGFQAPAQLPVSGLGPCPFHPVLRKSKCLVLNV

SEQ ID NO: 37061 - protein, 73 aa, Homo sapiens
VALQRRQIARRRRRLHAAGGLLAPAGGRAAGRPGRLRTATIAIGAEPARLPSAAACLGTNWDPGFEATSRARN

SEQ ID NO: 37062 - protein, 71 aa, Homo sapiens
MNISSGSRQVIFSSPNPIGRTTPVTHIRGRGRTTVPRRVCGRSGPCSRKTLWLSIMGVVVLLLLTLRGGGN

SEQ ID NO: 37063 - protein, 100 aa, Homo sapiens
LQRRRWCRRAASHHQQLLDKGRRVAVFVPALFRLPVIPGLPAPLSDEHFQAPLCPFSVLMLSRPRQPSGALWEMPARNEQALLLGSLLSPSWTYSPPDTL

SEQ ID NO: 37064 - protein, 66 aa, Homo sapiens
LLGHRLSAYHHSIFKWSPYVERPRGFILVSFSGMSWAGEGVLGATALSPPLKGRRRCLLPSPHISA

SEQ ID NO: 37065 - protein, 33 aa, Homo sapiens
LSLISLLLSLHLWPPLGVSHLCLCLISLSWLNT

SEQ ID NO: 37066 - protein, 38 aa, Homo sapiens
LYFLEKSVFFLLTLTASFWPGTTGGTWQIMGFEELSIC

SEQ ID NO: 37067 - protein, 78 aa, Homo sapiens
LLLKSPGGRRRRRGFLAAASAPPPPSPSPRFLSAPRAPATRPQPALSSAPRSRRARPSPRHGGPAGPRAPLHRAAHPA

SEQ ID NO: 37068 - protein, 35 aa, Homo sapiens
LLPLKMNFMNLFQVDLSSDVAWWAFLLVLMWFFGF

SEQ ID NO: 37069 - protein, 54 aa, Homo sapiens
VEFRMYTHPERQRGHLRKQRAPSWLPSDRAHGYWVGLLRTLSTAWYACGLGIRI

SEQ ID NO: 37070 - protein, 24 aa, Homo sapiens
MLYSKMKENMKCFFLSLLVECVSI

SEQ ID NO: 37071 - protein, 50 aa, Homo sapiens
LRGCAAEGGCGAPARAAPAQGAAPLLLLLFSFLACHRGFWGKKRPFMWPL

SEQ ID NO: 37072 - protein, 82 aa, Homo sapiens [sequence omitted]

SEQ ID NO: 37073 - protein, 105 aa, Homo sapiens
LGTCPKPVSGPPWCTVPETPAWEGKLSGGLGLTLVVFFWVVAGNSPSPTWQRLSLAPFPGAAGRDGHRVCPLHVLPRWWWRAGRGVGAVFLLSLSFHPSLTGSRK

SEQ ID NO: 37074 - protein, 33 aa, Homo sapiens
LPGIPHAARNPTHSYSVRLPRKGCSAVAALVRQ

SEQ ID NO: 37075 - protein, 46 aa, Homo sapiens
LYYCLVLFILAHRGFSHRKFGQSELNIVSQPLGPEDFWDPAVGRRK

SEQ ID NO: 37076 - protein, 46 aa, Homo sapiens
LAHTLGHTVLCALILITGVSKGSIYPDGYLDHDYLDWGEGGSVFFF

SEQ ID NO: 37077 - protein, 65 aa, Homo sapiens
LHIRDITVYRLTTGRMLRFYMALVWSTSTTMHFIGQLKHFKMSFMLTPAFVEPRKFIYDLGSCSK

SEQ ID NO: 37078 - protein, 61 aa, Homo sapiens
LDLLRLPSCDAVLLFVLGGSASAEMWAAGQDGHSGSAQQRSPDSDWGSKQGLDRPGEPVGQ

SEQ ID NO: 37079 - protein, 70 aa, Homo sapiens
LLKVSPPTCIALQSVASALANSASSPADWASAEMWAAGQDGHSGSAQQRSPDSDWGSKQGLDRPGEPVGQ

SEQ ID NO: 37080 - protein, 63 aa, Homo sapiens
MEQIRTTPWTLISSLAPELAFEASAEMWAAGQDGHSGSAQQRSPDSDWGSKQGLDRPGEPVGQ

SEQ ID NO: 37081 - protein, 36 aa, Homo sapiens
LLTRLIHLFSAFILQTINLHYPLLIQKYLMKTILIH

SEQ ID NO: 37082 - protein, 95 aa, Homo sapiens
MTWGLQHPSSKPFPKKVKRSQDDWHLLLLLLFFLFPCPAPSCACVSDNTGASTGVENPAAQLSSAHRSLGNGLSLCNKKIFFFFLNLHYIFFDCL

SEQ ID NO: 37083 - protein, 41 aa, Homo sapiens
LPPGSGLFAPAAAAPPFHLVGLLHWLLVAARGLGGRPAERQ

SEQ ID NO: 37084 - protein, 123 aa, Homo sapiens
MQAQFCCSAVCSAFLHILASPSGAKMAAAFQASHPDSDPEKLPIPTWVSLCRNEKPHPAAETSPSSVFSGLIHQRRPPLNQSLAKRMGPPGRLDQTGPALWGWGEAQMKAAGQDGLLDLCYQQ

SEQ ID NO: 37085 - protein, 158 aa, Homo sapiens
MGDHGGRREPAHPDCTLLWSGPASHLQPGCERPGPGHWGDPLTASPRGAPAPADARPLLAPSAALSATEQRGGQHACPGPVCQPSAPGRVHTARCGAGGPPRTHRCGQRPHGRAPAASTAASPAVRHSPQWCPCHQWAPHNRLGPRAADAADHWRGEV

SEQ ID NO: 37086 - protein, 139 aa, Homo sapiens
VYAALRSCRRRHRSSLLSHVLRPGRQLRPRLPYALLFLLWRRGLQLIPSAHALTSPPAPAQPHGTLLHGGPPSSPPTCAPPVEPVLRPPPPPSPPPPPRLRWLWACLQLCRLLGLQGAWRRCCFLRLETQLQLPRLSGL

SEQ ID NO: 37087 - protein, 50 aa, Homo sapiens
VFWTFMALRFSRMQTTALSSSLLIIVTKSCNKSSLNLLLKKSRRSIYGRI

SEQ ID NO: 37088 - protein, 43 aa, Homo sapiens
MALRFSRTTALSSSLLIIVTKSCNKSSLNLLLKKSRRSIYGRI

SEQ ID NO: 37089 - protein, 47 aa, Homo sapiens
VTHDMFWRLWRTTALSSSLLIIVTKSCNKSSLNLLLKKSRRSIYGRI

SEQ ID NO: 37090 - protein, 43 aa, Homo sapiens
LRAWPDLQTRLGQHFGGGGGVMGGGHIGALLLFLLSWRVGDSG

SEQ ID NO: 37091 - protein, 57 aa, Homo sapiens
LRAEHGNFSSNQSAPPHISGMLHGDMLLSLPSAPATWIVSSPSSSFSAALFSTASGN

SEQ ID NO: 37092 - protein, 13 aa, Homo sapiens
MYIFPILFSVYME

SEQ ID NO: 37093 - protein, 34 aa, Homo sapiens
LLDLNSTESLARLSYLAANCCLICWDLLSLLLIM

SEQ ID NO: 37094 - protein, 43 aa, Homo sapiens
VAETSGRSRSLGRSGPRQRDMVLLCCQSGLKLLALSDSLTSDS

SEQ ID NO: 37095 - protein, 51 aa, Homo sapiens
MTTALLTSSLFISLSSTHPFTSLCRFICIPPPVLWGYTASAFPHCMGMCSL

SEQ ID NO: 37096 - protein, 32 aa, Homo sapiens
LKIARLFLSLCSKLFSFFTRFCFPPPAAVVSH

SEQ ID NO: 37097 - protein, 51 aa, Homo sapiens
LSLPVMATFGCCLHVWGHRAPSPSPEKLSQAFWLSSTGALQTPGPFQSKSN

SEQ ID NO: 37098 - protein, 33 aa, Homo sapiens
LVFGAGLAPSLGSGSSLSTRASPPSLLGAALRG

SEQ ID NO: 37099 - protein, 36 aa, Homo sapiens
LSLPAAMCLLHTCTHALAHIHTCVQACADTQGWSCC

SEQ ID NO: 37100 - protein, 83 aa, Homo sapiens
MSLFAQPSVVSGGFSCWEASGWTMWAPCWLALQIVSAARLRSIAGGRTMGTSSPSWKGRIQGTAMGTPVSTSRTSQGISLPYT

SEQ ID NO: 37101 - protein, 112 aa, Homo sapiens
MPHSRNHACSPGPFAVLWASGGFPAIQAGLPPLRRLVPRVGGGLSRMPPGVRAWWAQFSLPLSLGEEEGLGGLRSWALGLSCPPLLLCEAADPSLPTEGLGLEASSRLPGES

SEQ ID NO: 37102 - protein, 32 aa, Homo sapiens
LAMDSLHRTASLLLATVLPFLSLALGVAEGAD

SEQ ID NO: 37103 - protein, 52 aa, Homo sapiens
LPWRDQRAFVFLLTLHLLFSPNTLPATGGPCFSEYHVSRRGHGGQGGFERAG

SEQ ID NO: 37104 - protein, 43 aa, Homo sapiens
LLMYWKCFLTFGSLCSHCPHPRPTTKNPAEAETTKRQSSLLLQ

SEQ ID NO: 37105 - protein, 80 aa, Homo sapiens
VGYFSSGAFAFFFLWARAECRPLSKDSLVKPRATLPSIVGLGSVAVPRARRARRQRERSRPRTGPGACLPPSLAPAGSLA

SEQ ID NO: 37106 - protein, 61 aa, Homo sapiens
MCPTSFTKGGGREGKGMRRQVSQKCLVLCTCPFVVVVVVKGISFFKRNLRRCGFHFSVTNR

SEQ ID NO: 37107 - protein, 102 aa, Homo sapiens
LLWGFATGCWLFSPPLSRSLLLLLGCSTPVRIRRGGTSLSAAANSRRVRLRTPGAESRVPPPPRGTHSPRSPGPRVLPPATLPHFSPLFQSHGILRMPERWR

SEQ ID NO: 37108 - protein, 113 aa, Homo sapiens
LSSRLGTPGSLTAAAAASASRTIGSLGNNSGGRPQRGSGSPCLRGSGDSSRPPPPGRTASVVPACNASAGEWLLLCPSWGPSQDQSANSIPPAGRSRGAGTKPAASSRADPGT

SEQ ID NO: 37109 - protein, 32 aa, Homo sapiens
VTPRRRIPGAGVFSQLLLPVGLGPGLDLRWHP

SEQ ID NO: 37110 - protein, 103 aa, Homo sapiens
LLPRAQKWLVLSLQRNAMRVGEKMMGRLFHSFSFYNFTFRDFSVPCLLCCGTQSALAWMAENPLDPGSTYSMMARRRTKLETVLALRKQEGRRVKGTSTCTQR

SEQ ID NO: 37111 - protein, 23 aa, Homo sapiens
LLLCSYDLLRLLLLWMDRAGALP

SEQ ID NO: 37112 - protein, 48 aa, Homo sapiens
LKRRRRGSLWWCEWEAAALVAAAGVRREAAHSTADWSSGKGEDGDRRI

SEQ ID NO: 37113 - protein, 37 aa, Homo sapiens
LNMHFAQWLEMCWWWNVLVIVSGWRATAPQCSAMTDS

SEQ ID NO: 37114 - protein, 18 aa, Homo sapiens
LALFMYLFRCFMCLPPAS

SEQ ID NO: 37115 - protein, 163 aa, Homo sapiens
LPGLGREAGGFSGYKAAEMWSFLPGAESVSMGPVPGVSSLGACWTHDQDSGRAEDRPQAPRITQYTWVLSFLFTEKPQTRSTSPISHQGQPQTTRALSLRQPQHPSAPASGRPRPPHSSGPDLAEAAPVVDQASQAAGRASSGLGLWEQASVSQGFRNAAFEA

SEQ ID NO: 37116 - protein, 27 aa, Homo sapiens
LAGSPLMKLTLALISLVLGRKGSEAIQ

SEQ ID NO: 37117 - protein, 194 aa, Homo sapiens
MARSVWCWSTSASAGPTASQWTTRMGSCTGAMHGQTRLNGSTWRQVRTARWFCPATTWTCFQCLCLRISSTGVTGLMPTALSSAGAKTMPQTPCPCEPASASSLKTSKSSTGTGRKAPTCARWPMAGASSCACTGAVGSGPAPVPTGCWLKTEHRAASMPATCSTQSAPFSRVSTCRMSATSMRPCSPSRTLST

SEQ ID NO: 37118 - protein, 91 aa, Homo sapiens
LAMDGPRAAALRPREPVQPRAGAPTAAAGAAAGSTLPRPSRPQGPHVLGRRRLQHQRLRRWLGESSQWLGDVGLFSAGSAGGMVLGLLCRV

SEQ ID NO: 37119 - protein, 54 aa, Homo sapiens
MRAVNTTNSKCRCRMRPRCRRLPLGLSGARPRSACMCRTPTSPPCSRRTHFGPA

SEQ ID NO: 37120 - protein, 54 aa, Homo sapiens
LSGIAAYALILQLVSNRGSIDWELLIQKIKRKKPENIINPLRTRHNELYILPLP

SEQ ID NO: 37121 - protein, 48 aa, Homo sapiens
VVGFLSLSLSLLALPTQQRRPPARNGLPGASSSSFPKLNCPVSDSDFS

SEQ ID NO: 37122 - protein, 81 aa, Homo sapiens
LAFATCPTGTPAVLWPPTRKFCLYPLPHLVGPLLHKALVCASLALFPLFVPASAVRWLRSSTGPLPPPGAEIQKVFHIQVL

SEQ ID NO: 37123 - protein, 107 aa, Homo sapiens
LISPTLLVLVATRVRGRPRPPSVCRCSGGGLAGCGRVCACGLGPGPSQKLKRQMSGIATLAPPVAGGLWGSTWSRTEKLLCLCSLGTHWKLYSDIFWDLVWIVQTGA

SEQ ID NO: 37124 - protein, 103 aa, Homo sapiens
MQQKPHRLERNKSSFLCPGAGCGALAEPSLQSPPGPLAVEGGLGLARRAARPEHPGQKTIDVHLQMQHPVPGALRWVQNVDGVFKRISFQVDQEVNVVILFPI

SEQ ID NO: 37125 - protein, 32 aa, Homo sapiens
MLGAPRATAAAATATQPPPLRPSPVSAADARR

SEQ ID NO: 37126 - protein, 116 aa, Homo sapiens
MHCPCLLSACCMLGPSMRSAVMGTRKGLCRRHGETQRAAGAEGRAAQAAVLHHTQAREARDRVRLHAPLPGDRAAARAGGTGEGHGEAAQDSEQLHGTAEDQPGAGGQAVPHGPAL

SEQ ID NO: 37127 - protein, 85 aa, Homo sapiens
LRALRSTSAALSSTCGTLQVPLTMIMSGLWPILILMLCSSASTLADQKHWTVFSRSGKERLKSSAPMPRLCWLAVNWTCGLTWPH

SEQ ID NO: 37128 - protein, 33 aa, Homo sapiens
LVRLSSCVPVALMSAMTTSSSQKNITPAILTCC

SEQ ID NO: 37129 - protein, 71 aa, Homo sapiens
LGLAFLFLLTSSLPLSSTTRESCWPQVTRAAGSSSSSGNQRTLGKTAVAWTTCPGPRFWNTERASGQKPIY

SEQ ID NO: 37130 - protein, 77 aa, Homo sapiens
LRPSRQSGRRKRELKAMKSVPHATSPRDPRRVWNPSPPLSAGGQLRPAGLGLLNTDFKSGPRGPASLREVVAFCGCC

SEQ ID NO: 37131 - protein, 44 aa, Homo sapiens
MLRATTGMTTKLFMRGKDVPSRSRCGIISAGLFITISGPFCLLS

SEQ ID NO: 37132 - protein, 40 aa, Homo sapiens
LCLPRVLEEETGGAASPLSVALLAMAIRGPAALSAALYLH

SEQ ID NO: 37133 - protein, 39 aa, Homo sapiens
LELQAAFWMQSLREVNHNTHWKSALLILHLLVIMHRCHL

SEQ ID NO: 37134 - protein, 139 aa, Homo sapiens
LNVFFFPWTGSLLCVYSEAVMTCCPGSSLLHTECSGSLNHCFSFESRASCHFHVASAVSPPTPLCSPATLMAQDKAGKPSQKHLWPRKPLSPSLSHEAQPSQALMLSQWASHRAKEGLFSVPSLWVRTRGHAECPLLTW

SEQ ID NO: 37135 - protein, 191 aa, Homo sapiens
LNVFFFPWTGSLLCVYSEAVMTCCPGSSLLHTECSGSLNHCFSFESRASCHFHVASAVSPPTPLCSPATLMAQDKAGKPSQKHLWPRKPLSPSLSHEAQPSAHVEPVGQPQSKRGFIFSPLSGSEPEGMLNAPCLLGEGAPPESVLSAGSAMLVEVGGTVLTGKKQGQEPKCLTSKGGPVPWSQGELQSFG

SEQ ID NO: 37136 - protein, 23 aa, Homo sapiens
MVSILMGIRQSLICCLKMLLTSG

SEQ ID NO: 37137 - protein, 81 aa, Homo sapiens
LPLSLPGPRDDASSARTCRPQRTARPRPWPAGSVGASAAAAAAAAALGGRRLRPGPPKERTPHLRRLERPCRAGPGGLWPD

SEQ ID NO: 37138 - protein, 267 aa, Homo sapiens
LPLWAALPLHPQRGRAAARAVGGRLRGPACLWHARCVAPGLPAGAAAQVAPQPQLLGLPVGPPSAPGRPRVAAAARQPHVAHAAAALLLFGLVLLLLRLLLFLGLRGLHALGRPDMLRLRGGRGCGRSAVRHRGRRGPAGAGGPVRGLLVGLVRQQRLRLRSGAQQPHHAARHPDPQLCRRGRRRLLPQSAAAAAAGPGAPRAAAGAAQRDPPRRGRRTSLAALQLPAAAPPVRLARVRRAPQPPGLAVGPRQLPKRLPELRQPQRL

SEQ ID NO: 37139 - protein, 25 aa, Homo sapiens
LQIIICSLFHLPLEGILILQTMLPT

SEQ ID NO: 37140 - protein, 32 aa, Homo sapiens
LPRSCAAPASLRLAGAAETSMAWWQWLAPGWP

SEQ ID NO: 37141 - protein, 168 aa, Homo sapiens
VALIPMTLKHAWPSPEIPAPSPGPDGNRSSWPQPPREDPITEERSMWRPLAEVGGPGSWRGVKGQDGAGAAPKHGENQRPQEWQTLDMLLEMGGQNDQRSGSLHLRGSRVTSFKVWPGTPPIQPYAAQDWLNSSTLHCCSPMTRHFPPATAGSPVTPQAAQMPGRSCW

SEQ ID NO: 37142 - protein, 103 aa, Homo sapiens
VGPGTGEEDPGPCARAPGAAGVRTSATVGTLGAWLSALLFTRLSSLPRNQSSRPPPPSRAHPPPPGSGPARTQHHEGTWDLPGDFGRTFANCGGRDVLRWLPL

SEQ ID NO: 37143 - protein, 32 aa, Homo sapiens
MVWNFLSLILMMHHARKFFLIPKLQFQNYLPF

SEQ ID NO: 37144 - protein, 44 aa, Homo sapiens
MSPTTYACCYNLSSVNFLSLILMMHHARKFFLIPKLQFQNYLPF

SEQ ID NO: 37145 - protein, 41 aa, Homo sapiens
LERTYMRFVFKRKTVFSSRLVPSLLISGATLLLVRWKFQQE

SEQ ID NO: 37146 - protein, 96 aa, Homo sapiens
LAFCRRCGAWVHWAWCLVAALSSFPSTAQGPSAFCGAGLRPCCVPLPWISRELVFLEVPDPCSGPGRLPGPSYGHERLWRVICSSRNRRILHGSVM

SEQ ID NO: 37147 - protein, 55 aa, Homo sapiens
MKFLWWQKAFSQRMEVAALLVFRTCWIRSLCVWPQPLETSYSAVSAHNSWSVLGV

SEQ ID NO: 37148 - protein, 43 aa, Homo sapiens
MILSKFQDSWVKLHPLGAVTLSQVSGAASNLLIISQRSKRPSS

SEQ ID NO: 37149 - protein, 45 aa, Homo sapiens
VCSERQRRLLGGARAPLCPSFLLQSLGLPWSHPPPACPLVSLQGP

SEQ ID NO: 37150 - protein, 16 aa, Homo sapiens
LIKRGLLLMHSIDLLL

SEQ ID NO: 37151 - protein, 144 aa, Homo sapiens
LPIWVFGFFCVFIFFFFFLTRSVLPVNQGSVSVSVGSGSRAFFPFALILRKAEPLGCGGRGQGHIPIRVGRGSLLAHSGCAGKKRPGLGRNRSPTVSACLASSPFCQLSSLWFLCPQVSGSIHKRKIHFFPQGWGKDSGESARK

SEQ ID NO: 37152 - protein, 79 aa, Homo sapiens
LAGGHPCPTAAFRQQTRHRHTEICQERGVSVIAGQRGWPPEAAQAAATPLQQRRFPCGPSTCWLLREPVLVLLLRVLLL

SEQ ID NO: 37153 - protein, 9 aa, Homo sapiens
LLLCLYMCL

SEQ ID NO: 37154 - protein, 8 aa, Homo sapiens
LTWMWLLW

SEQ ID NO: 37155 - protein, 61 aa, Homo sapiens
LRLWARGAWKRRLRRRRRRLPHGVLLHCHQLHASQQRTLSQHQGSFPGPSQQEREQNSGLC

SEQ ID NO: 37156 - protein, 64 aa, Homo sapiens [sequence omitted]

SEQ ID NO: 37157 - protein, 39 aa, Homo sapiens
LPGQPRPRGWEMGARSRPRAWATRSRYTIIILLVLCVAR

SEQ ID NO: 37158 - protein, 10 aa, Homo sapiens
MCLLIVLLFA

SEQ ID NO: 37159 - protein, 43 aa, Homo sapiens
MDSPTPRPSCRCLPLTMLLGPLPPHCSPRTSQAPSFLPQRKEL

SEQ ID NO: 37160 - protein, 60 aa, Homo sapiens
VDLKRLRVSFKTLLYVAAMHFFQLYFQPCNVHTSISVPRPLQGFLVPERAMCFSPLELFE

SEQ ID NO: 37161 - protein, 69 aa, Homo sapiens
MLLLPWPMAFRLLAAADGARQTTGQDSSATEHWPQSRPEQQPPSHRPPPPPHPGAFPPPSGLLRPRHRG

SEQ ID NO: 37162 - protein, 46 aa, Homo sapiens
LCVCVCVCVCVCVCVCVPMSMYRVRGGRVAGGCFIGWRAPCPRAIK

SEQ ID NO: 37163 - protein, 63 aa, Homo sapiens
LRSARRVGLWRKRKFAKARVTSSRSWALLKIIFSASRGCSITVRWSLGIWKLPMCRGIMIFPS

SEQ ID NO: 37164 - protein, 33 aa, Homo sapiens
MLQARSKHILSTCIAMNFYQMCFYLALHIPLTK

SEQ ID NO: 37165 - protein, 39 aa, Homo sapiens
MGEGSRMFGVFLFPPFCPFLLPLFLSQLFPLRCLLEPGV

SEQ ID NO: 37166 - protein, 64 aa, Homo sapiens
VMCVLAFLTTPLLCISFFHFLFQAFLFLPCGNSFGASDCSSSECAAIPVDPVPGLQLLHLCQLS

SEQ ID NO: 37167 - protein, 49 aa, Homo sapiens
LAAATPGPLIKKGEGKDKCKKGGLSPPRVAGGRGGSMCSGQLQGAPLQK

SEQ ID NO: 37168 - protein, 50 aa, Homo sapiens
LGGVHSTFLPSHRKLSSAVGCWGRLMFGSLSTLPIPDSPSHSFQSPQGDT

SEQ ID NO: 37169 - protein, 114 aa, Homo sapiens [sequence omitted]

SEQ ID NO: 37170 - protein, 42 aa, Homo sapiens [sequence omitted]

SEQ ID NO: 37171 - protein, 20 aa, Homo sapiens
LTVLNAVVLSVSSMLVNCTT

SEQ ID NO: 37172 - protein, 40 aa, Homo sapiens
LFFLPEFSLWSTSFLRLSSVFLFLSPLPPTFFFPSQFLAL

SEQ ID NO: 37173 - protein, 45 aa, Homo sapiens
MAQAIICGALSVVCPAGRAGVTSARNPDGVWRGGAAGEPGPDRPR

SEQ ID NO: 37174 - protein, 130 aa, Homo sapiens
MGHRPAGGMGGLGLLGRAPILRGAAGEGPGNPDHAQLARVRLPPGHQLFLAHHRAPGPGTDPPPRAALGDPGGALQLAASRDLLKICCVPSTALALVGTQNSPNPCMHANKNVKITTETSLRRARYRVLV

SEQ ID NO: 37175 - protein, 41 aa, Homo sapiens
LPGPGWLRCRGPLLPPGVQRARARVFMCLCACVCVSLSVCV

SEQ ID NO: 37176 - protein, 42 aa, Homo sapiens
VAFFLWLPVGLRTLADICWLATANIIQDVQQREQHRWQNRLS

SEQ ID NO: 37177 - protein, 67 aa, Homo sapiens
LIWCLEHLLNRLMFTEVLFVQFWMKLLWAIIALSLRMAKLALEKLLQWKVKGHLMKSIPGKRIPWLV

SEQ ID NO: 37178 - protein, 36 aa, Homo sapiens
VRLEKWRLLPPLLASAFWLLLCLPHWHPAEGRWEDL

SEQ ID NO: 37179 - protein, 43 aa, Homo sapiens
LSLPYLSLVQVLSALCGQRILLQEEVRVHCGAKADIKVCVLCG

SEQ ID NO: 37180 - protein, 126 aa, Homo sapiens
LWGFLLWVSFICAGRSLIDLVPSSSAFSSRLSSASAPSSWWLFHFTVILSTPSSALPLPSQACPFTSSSSECQNISDRFTSEGSWGLPQGTSRSCVCQLLQKWIWKMEERCPSNGIPNLTKHHLES

SEQ ID NO: 37181 - protein, 31 aa, Homo sapiens
LSLRNMLVQSLFSLASCTRMLTGERAAPSTC

SEQ ID NO: 37182 - protein, 48 aa, Homo sapiens
LRPRAPSGHPCLDSVLSAAAGPSCLASVSLRLFSALPALTAARHCSRS

SEQ ID NO: 37183 - protein, 104 aa, Homo sapiens
MLSILFLPVSSIISISYGQSIVGNWCWLTLHGRIEKSSCESLPKAAPQWSLWLEVHGPPCSCPWRTPRVPSILLRPTLFKNIYSMYAYMELKCHYCNLESALKY

SEQ ID NO: 37184 - protein, 100 aa, Homo sapiens
MGGAPPGPHWLPLQGAPGGLSSGGGDTYPLPRLRPREAEGGLPARACAREPWGVLLGAGAGGGTAGAGAAAGPAGGAVRPGQGGAQRGAAAGPAGGGGVG

SEQ ID NO: 37185 - protein, 84 aa, Homo sapiens
MEKSPRWGAGWRDSSRESVNAHFWPRRKCRTLQRRMLKVTCFGMLLCCSQSPLSLWVSHLIKNKKTCILFLWGIWLPGEYYQMN

SEQ ID NO: 37186 - protein, 68 aa, Homo sapiens
MEKSPRWGAGWRDSSRESVNAHFWPRRKCRTLQRRMLKVTCFGMLLCCSQSPLSLWMKKLKPKSLPHS

SEQ ID NO: 37187 - protein, 60 aa, Homo sapiens
MEKSPRWGAGWRDSSRESVNAHFWPRRKCRTLQRRMLKVTCFGMLLCCSQSPLSLWEWRR

SEQ ID NO: 37188 - protein, 43 aa, Homo sapiens
LGRRCASLHSTGTCGLLLLIHWSGHAGKIWDHLCFLHAVCLHC

SEQ ID NO: 37189 - protein, 92 aa, Homo sapiens
MASLRARPPPRCTCSWWTASPSPTCLSRRRPRPRPRPTCSPSTWWWRWPRCLRSSSFRCSCSWRCGCVGGAGRPRWVAAWCPRAPFQGILWT

SEQ ID NO: 37190 - protein, 201 aa, Homo sapiens [sequence omitted]

SEQ ID NO: 37191 - protein, 68 aa, Homo sapiens
LPSGAFSTCCCLTGFLSEPHALRPLIPGRKGWSPQHPQHPGKWGARLCQRPSRSTRRCSSPITPSCRP

SEQ ID NO: 37192 - protein, 67 aa, Homo sapiens
VPRAFSTCCCLTGFLSEPHALRPLIPGRKGWSPQHPQHPGKWGARLCQRPSRSTRRCSSPITPSCRP

SEQ ID NO: 37193 - protein, 51 aa, Homo sapiens
LFSSGKIALASSAFISGAEGLTGLEIAPEKSIRGVRRLVPHCRARRSRWWL

SEQ ID NO: 37194 - protein, 47 aa, Homo sapiens
LLGLFLFGLISRLGLLGTATLTVWFQTPVPGWIPAIHAPSLISRSSQ

SEQ ID NO: 37195 - protein, 91 aa, Homo sapiens [sequence omitted]

SEQ ID NO: 37196 - protein, 44 aa, Homo sapiens
LPNRTILLSKLTNVITFQFNLSDSLLMDCCSACICVFSLVPLIF

SEQ ID NO: 37197 - protein, 27 aa, Homo sapiens
MFMSLPTILCGFTSFQMDWSALPVASM

SEQ ID NO: 37198 - protein, 27 aa, Homo sapiens
MFMSLPTILCGFTSFQMDWSALPVARH

SEQ ID NO: 37199 - protein, 142 aa, Homo sapiens
LHLLRPHSLGGGDIALWAFGLGAPSLLLHCSLWLPIVGPGRVPLALKGAQAPSHPGTPYSTALAAAGVANGGGCWPPGFPQPNCLCHHVGLTFHPSPTSLVPVLGWTAPFGYRKAGGVSPLLPLHCGHSPLALRLGSEYILW

SEQ ID NO: 37200 - protein, 106 aa, Homo sapiens
LTAAHPFSLQYVVRILPFPTMNPPAEIPVHILSTKNLNLKEWLKEVRRHLQHFYWRSPCLDHQILTVLPRLQCSGAISTHCNLYLLGSSNSPASASQVAGITGITH

SEQ ID NO: 37201 - protein, 67 aa, Homo sapiens
LRRFSPRKCLLRFPCSSVSHTLSISFCNFQAFPSNCMYLVTCFQAGSLSGPLAWGKPPHLLRVLFRV

SEQ ID NO: 37202 - protein, 33 aa, Homo sapiens
MTFSKDLSFCRLASELCLLGATSLRQLRMWMQI

SEQ ID NO: 37203 - protein, 41 aa, Homo sapiens
LSWAPWKPAAQARLAVLFCGFPLPGFRNAACLSVSPSVWWG

SEQ ID NO: 37204 - protein, 68 aa, Homo sapiens
MPAARAADLAAPAGAALCAAAGTLAPVEPGSRCNSSWMVAQPVRAGQGLCSTWRGPPIPGCRTLCPLT

SEQ ID NO: 37205 - protein, 61 aa, Homo sapiens
LARGNHRLFSRILFFSHLLAFFFLPPWLPSPNPAIPSSTPVLPSPAILSHPTCNLLSFAPP

SEQ ID NO: 37206 - protein, 74 aa, Homo sapiens
LRASPLSSLCLACLTSKGAGPLWTHLAPQRKLPAGGPPPERWMSCSKGELLTLGPFEGVSFGLFSCFLHKSKFV

SEQ ID NO: 37207 - protein, 54 aa, Homo sapiens
LPLRSPDSGSQSGFFSHPISPWFHRTLRRLLGCLTLTLSGRILNPSWVSSTGMP

SEQ ID NO: 37208 - protein, 38 aa, Homo sapiens
LEALETIIGTLRRLLGCLTLTLSGRILNPSWVSSTGMP

SEQ ID NO: 37209 - protein, 133 aa, Homo sapiens
MISCPAGLCTWGWTLPACTPVLSLGSQDRTGWDSRIDRTASPMEGAPWQGRWTASRSRERTWLTASQRGHGDLSPTAARIGILPTSGAWKPILPQNRQKGTQPGRCLNFSPLGPGAKKPSHTEPGLLTARTGS

SEQ ID NO: 37210 - protein, 96 aa, Homo sapiens
LLKEPTQDRATIFLYFIVIYIFHLYSFVKLCISVTYSPQSTFTNACKDWHLHRMSVFKFSKLLFCLFICFCFFLRNEETNHPLGVIYRLSDSTQYI

SEQ ID NO: 37211 - protein, 23 aa, Homo sapiens
MNSLSQIFSLITVSTFLVMAHLF

SEQ ID NO: 37212 - protein, 40 aa, Homo sapiens
LRRSKTILLHLFVKLPLQVVLSFIWMATPHQVLKCLKHTT

SEQ ID NO: 37213 - protein, 49 aa, Homo sapiens
LFLVRDAAAYSCSDLLKSNKEKDIVFLKKRSFVSFLCSLVCFSCPFLFS

SEQ ID NO: 37214 - protein, 48 aa, Homo sapiens
LLVRKTTTRNGKGYSPLHKPRTWLPRRQPPFLPLSCACAFVFYFEQTF

SEQ ID NO: 37215 - protein, 57 aa, Homo sapiens
LPAASACYGPGKHLGIPFLHRDPSQLKLIHSCGSTMQLTQILSKQSSQVGDPQESLH

SEQ ID NO: 37216 - protein, 49 aa, Homo sapiens
LERRAPLAPSASSPGAAATRAGFLLPCLPAVPLARRSLHFPGEPKRVWP

SEQ ID NO: 37217 - protein, 17 aa, Homo sapiens
LCSSVYIYYFLSSLTVC

SEQ ID NO: 37218 - protein, 16 aa, Homo sapiens
IACVPLQFPWFIWLTC

SEQ ID NO: 37219 - protein, 31 aa, Homo sapiens
KARAGAGTLGLAVFSSCSAVGGGGRNQSLGD

SEQ ID NO: 37220 - protein, 10 aa, Homo sapiens
ILAVLIFWIN

SEQ ID NO: 37221 - protein, 21 aa, Homo sapiens
LCRIHCLSLVFYSPWLLLISR

SEQ ID NO: 37222 - protein, 33 aa, Homo sapiens
IRRRGKWTQDLTGLSLLLAGHGGFGGRCKVYCG

SEQ ID NO: 37223 - protein, 36 aa, Homo sapiens
RCASRVMPGEWKDLTGLSLLLAGHGGFGGRCKVYCG

SEQ ID NO: 37224 - protein, 37 aa, Homo sapiens
MPSWGPVGPTYKSSPWEPGCLALLPGSVSATWSATDP

SEQ ID NO: 37225 - protein, 16 aa, Homo sapiens
IWILGFLQMGLYRTED

SEQ ID NO: 37226 - protein, 14 aa, Homo sapiens
LGFMLQSLLISLSM

SEQ ID NO: 37227 - protein, 55 aa, Homo sapiens
LISRTSTLLPALRVLLGQGLPCHATCQCLAVEPLGAAAVPAVQFVLGVSVPFHGP

SEQ ID NO: 37228 - protein, 17 aa, Homo sapiens
RLLHFLIFLMTKMNGNL

SEQ ID NO: 37229 - protein, 23 aa, Homo sapiens
ITAGLLMLYARRKRARDNLVLDN

SEQ ID NO: 37230 - protein, 36 aa, Homo sapiens
LAAVGWKELVCSHLLACASGLALSPDSRCKGALCER

SEQ ID NO: 37231 - protein, 48 aa, Homo sapiens
IADLYRPLPVVLPLLQQRHCFLPLFFQPHGEYHRSEVQFSSCHIKSTH

SEQ ID NO: 37232 - protein, 48 aa, Homo sapiens
KAFSQRMEVAALLVFRTCWIRSLCVWPQPLETSYSAVSAHNSWSVLGV

SEQ ID NO: 37233 - protein, 85 aa, Homo sapiens
MPRPASTRAWCAHALTCAHCLALPSEMNPVPQMEMQKSPVFCVAHAGSCRPELFLFGHLVSSRELEIPCLPLTSTGSRWEENSCD

SEQ ID NO: 37234 - protein, 46 aa, Homo sapiens [sequence omitted]

SEQ ID NO: 37235 - protein, 37 aa, Homo sapiens
MQTAARRWAQLLSPLTMMTRLLGATPVRRILSPTRCP

SEQ ID NO: 37236 - protein, 20 aa, Homo sapiens
IYPQLREALVTLLLQCLVSL

SEQ ID NO: 37237 - protein, 21 aa, Homo sapiens
LRLRLRRLRFPMGLACGAWAL

SEQ ID NO: 37238 - protein, 72 aa, Homo sapiens
LKPSGRRRGLTLALGSSGHCSGPRLLLLTSALRLFSIGVEAPPVLSCLWREANLPLDQREEKAETGSNAVDW

SEQ ID NO: 37239 - protein, 21 aa, Homo sapiens
LLKQLSLLFGFLRLLASERHL

SEQ ID NO: 37240 - protein, 14 aa, Homo sapiens
KFLEYLFGAVSLMT

SEQ ID NO: 37241 - protein, 54 aa, Homo sapiens
IALGFLRGRGEGVRDKSPSFLCFFFSFAFSSFIFLFVCIFFPLLVEVRFPPTRP

SEQ ID NO: 37242 - protein, 30 aa, Homo sapiens
MRPCSEFISILKIFFLEFGGMGGGGGAYLL

SEQ ID NO: 37243 - protein, 33 aa, Homo sapiens
MLRSVFILCSCCPLLVDLSECFLTITSLKTLLN

SEQ ID NO: 37244 - protein, 64 aa, Homo sapiens
LKTNGSIAVCEVLENCLVSVCLFACQCSPAPSCPGHHPDVMPLLQLRGFIFSILTLALNAFGDG

SEQ ID NO: 37245 - protein, 20 aa, Homo sapiens
LKLRKLYSSLLAVVYIRAVL

SEQ ID NO: 37246 - protein, 59 aa, Homo sapiens
LADIFLPGRMHGPGSPAPEGGREAAPRVVLLEKGVSIQTPREGSWVYFREELEASHRAQ

SEQ ID NO: 37247 - protein, 76 aa, Homo sapiens
LRLVLPEFYFCLSQLESGRLSFKMEIGARGWRLGEGSIQKRRMSLYPRNSLRWAIGFCSARRRTARVEVWLVAVMR

SEQ ID NO: 37248 - protein, 53 aa, Homo sapiens
MGLRILSAYKTLSGRPAHPGALLWKVTHLILSEVVFCIIKGRKKISRRKSCEL

SEQ ID NO: 37249 - protein, 16 aa, Homo sapiens
MRAASLASTLTASWLV

SEQ ID NO: 37250 - protein, 24 aa, Homo sapiens
VGGRGGIIFYLKLISALSFSQLPA

SEQ ID NO: 37251 - protein, 158 aa, Homo sapiens
MYTASSSAETLRTVRRRSVPSSSMPYLALAHNRVSSLNHAASVDGWGTSHRNVADSFSRTSRSCSRFLKGTAGSARREDWNGHLQPWIPRPDRRGWETADRKGERTQVHGLRRSLGPRAPHPGAHRALRPAQSCRSGPRGWTPCRCRGRGPTACRRGS

SEQ ID NO: 37252 - protein, 47 aa, Homo sapiens
MHPSGCRVRPNLSRVCVCVCVCVRARAGTEREKLLVTEIGVETAQVM

SEQ ID NO: 37253 - protein, 79 aa, Homo sapiens
LVITLLIMFLKLSAKLIYLSIPSWSESQTSARHGRLCRHSSGKKRELPSPSSRCSPAGPPSPGRSAPLPSSFHFCRLRN

SEQ ID NO: 37254 - protein, 50 aa, Homo sapiens
LASTWVLRNVPRHPCHSVVGALLPPPLLAAFSSAAHTDAQSQRGWHGLAV

SEQ ID NO: 37255 - protein, 41 aa, Homo sapiens
MNDSAFPLRGMWVLRMVGVKLPLLSADSTSSLNAEICKKGK

SEQ ID NO: 37256 - protein, 45 aa, Homo sapiens
MEEITRFWMSCAHSVFATGLQSVLTSISSVTISYQEETCYCRHVL

SEQ ID NO: 37257 - protein, 49 aa, Homo sapiens
LDTLYWFDAPTWNRWSWSLGQPDIWSTPLSYAGIIMTVEIMSLFCILVT

SEQ ID NO: 37258 - protein, 82 aa, Homo sapiens
MEKYKNILPRDTASSDVKKNLDEMKQEWHAAKLQIQGHPQNQTLTLRWSWSLGQPDIWSTPLSYAGIIMTVEIMSLFCILVT

SEQ ID NO: 37259 - protein, 40 aa, Homo sapiens
VYIPSPMDSSVSMPPFQTVVCFLSPSTMLDLCLFLFNKFK

SEQ ID NO: 37260 - protein, 38 aa, Homo sapiens [sequence omitted]

SEQ ID NO: 37261 - protein, 50 aa, Homo sapiens
MGRWGVFLKTRITVLISLLTSCILLGKSLLVSISPSTEEKYFTELLWGLS

SEQ ID NO: 37262 - protein, 97 aa, Homo sapiens [sequence omitted]

SEQ ID NO: 37263 - protein, 34 aa, Homo sapiens
LCLEDGSALMFPGIMLRTAFRVAALFSSLHLGNT

SEQ ID NO: 37264 - protein, 10 aa, Homo sapiens
LILSERMHSL

SEQ ID NO: 37265 - protein, 89 aa, Homo sapiens
MQDSTACGSCSGGLLLTRPSTLPLARSAAPCLGLSALPPLPVTAGHDIGQDAAEGTRHAKKMAHPPRHRRPVRPPGSRRASTGLPGGDS

SEQ ID NO: 37266 - protein, 89 aa, Homo sapiens
MGLAAVRKDFRCSGLFTVVVESCLGPQAPSAAPGSPTGIHQTRSVSGTLGRTPGVAFSSPSMTSMWSIIQGATLMSWRSMEAPISTLPE

SEQ ID NO: 37267 - protein, 38 aa, Homo sapiens
MMGSQLLMTSDLKIVLSLFLLRAVKGWIISGVATPGLA

SEQ ID NO: 37268 - protein, 48 aa, Homo sapiens
LFQMKILLAAQIIRIGTSCIWKLLQWAFGVTKHTSGVPCGENPVQPAP

SEQ ID NO: 37269 - protein, 31 aa, Homo sapiens
LYFFYFVTFCDFFVQNCICTIEQFPADGMNE

SEQ ID NO: 37270 - protein, 82 aa, Homo sapiens
LRATLWGPAPWFLLLPLPPPDPSGPACSAPTGLQPASHRTFGGPRLERSAGVGAPRPQMQSSYREEARGIGSHILFADKKGS

SEQ ID NO: 37271 - protein, 44 aa, Homo sapiens
LMKVSIPPIKSVSDNTNIWVISGSVLLCLFSPPSCFVVCLITYC

SEQ ID NO: 37272 - protein, 65 aa, Homo sapiens
LNVSLSLCFQMTQCCLSPLNHLPQSCSKVSAAQKLNGLLVMQILPPGQEVLLLLVLPVLTPTGPL

SEQ ID NO: 37273 - protein, 66 aa, Homo sapiens
VNYHVDFYNRPCLGTDSLLLMGWRGVCVCVCVCVCVCVCVCERERERERFVPYILFQQPYILWSTA

SEQ ID NO: 37274 - protein, 51 aa, Homo sapiens
MLFEAVRLSEIMEEVNVNRKGKKSEDGALRHSIVNWKMRKSQQRRLRRGSQ

SEQ ID NO: 37275 - protein, 16 aa, Homo sapiens
MLNCFAFLKIFLVTFS

SEQ ID NO: 37276 - protein, 55 aa, Homo sapiens
LHLVCQIQEGRKLEFHFWIYHFPSDLGLMALLPCFSVLFCGEGMLPTFLILGLLE

SEQ ID NO: 37277 - protein, 46 aa, Homo sapiens
LLLLFLLIFFSWCVWWLFLSVEGKRRYHPRLSPTPLQNGFSDTPAV

SEQ ID NO: 37278 - protein, 58 aa, Homo sapiens
LLLLFLLIFFSWCVWWLFLSVEGKRRYHPRLSPTPLQNGFSDTPGSEGVGSPGCARSK

SEQ ID NO: 37279 - protein, 155 aa, Homo sapiens
LREPGAGAAGEKGGADSLTARSGLRLSLCDTARMTPARQLRQPRPLSQRSERASSPTATHRNRLPTSSARVSTAIAVAAEAAAASSSAREPMKPHSYRPLMLRRADRDTAADPKERRLGTNRPLCPGHSDLGPSPQTLLWTPRFAALCCSATQEN

SEQ ID NO: 37280 - protein, 35 aa, Homo sapiens
VLSCYGIPLLSFLLSNQVECFTGTWFIQLKITWDL

SEQ ID NO: 37281 - protein, 56 aa, Homo sapiens
LNVFAELVDVFVYKYDCCYITPQINSQIKTQLCCQYLILLYLFFLDICVFSNVTIY

SEQ ID NO: 37282 - protein, 135 aa, Homo sapiens [sequence omitted]

SEQ ID NO: 37283 - protein, 75 aa, Homo sapiens
LGGEKESRSDSPNFPGLGTFFEITFFSPRCTPITAGCAFSALPLLLLIFPSSLPGAAERDVFQRYKPFPPAPQFG

SEQ ID NO: 37284 - protein, 51 aa, Homo sapiens
MRPASLRTSLKATASCRQPRTQMRASLGVCGTASSMVTMATTSGSMSAMGS

SEQ ID NO: 37285 - protein, 80 aa, Homo sapiens
MSLGMWQHQWDKMDTGPPSQAPDTGHGGETSPPWPPWLPRFARGCSSVRLPLCTTVALGPGLPAHWPSPPSPAASYQQFL

SEQ ID NO: 37286 - protein, 123 aa, Homo sapiens
MFLAGPEVLAVLPQPPHCSLLCSPCGGRRGWDWGGGSHLHPRLFLGALLMWTVDFIPPSYSGPRPPTPPSEDGTKNGPLGLLRTLTMCTLQVDLIYLFFEKKRQKIPYYLQGLKAVPKSRKTK

SEQ ID NO: 37287 - protein, 47 aa, Homo sapiens
LGWRRWKHWWPGLFFQRGQPWLLLCSSLSARSLPLQGAHLPGDRGSS

SEQ ID NO: 37288 - protein, 53 aa, Homo sapiens
MSVYSCSFLLMSSAAQHIEMAQNVPGLGETQQRPMLTGCPHSACSHLPLGTCL

SEQ ID NO: 37289 - protein, 71 aa, Homo sapiens
LELSSSGWGWGLLRMLGGLGKEGVQRKGVPCPLDVTLRSWDTCSLCLWVFWLCTFVCPCKYVLGRKQKGLN

SEQ ID NO: 37290 - protein, 39 aa, Homo sapiens
LTRSYLKLLLLLGLESTYLFHLSQLEFWNFPPRGGGGGC

SEQ ID NO: 37291 - protein, 26 aa, Homo sapiens
LFSFLLLLVLKYIHTQIQIDRSKSMK

SEQ ID NO: 37292 - protein, 47 aa, Homo sapiens
VCLLFVLYLVFLIGASLLTCCRQLSYRRMNVRVGRGGCQGSLGIFDT

SEQ ID NO: 37293 - protein, 27 aa, Homo sapiens
MRRCCDRTTARKHTRSHGIPSKLRRRD

SEQ ID NO: 37294 - protein, 62 aa, Homo sapiens [sequence omitted]

SEQ ID NO: 37295 - protein, 92 aa, Homo sapiens
MVGRVSPKFGHLQIKTSAESVRLSLSKELLREFPSKIASTAVNRLFPAPAFEKSWSPECKGVRMLAGGRMCRRMRKRKNREIWMQRHRENAM

SEQ ID NO: 37296 - protein, 85 aa, Homo sapiens
MGVGCPAWTSTPVTMKSTVSSREVATVDKMKRRHAEYCAQEERSACPKRELLACREKQRCRRRGGNTLAVVRLLPAATALVPLSL

SEQ ID NO: 37297 - protein, 78 aa, Homo sapiens [sequence omitted]

SEQ ID NO: 37298 - protein, 26 aa, Homo sapiens
LAERSSRGPPDLQGPLPRPELSLPRI

SEQ ID NO: 37299 - protein, 102 aa, Homo sapiens
LDTSLKSSRLRPSPARGEVRGVRCQPLAPGGASLLMHRGRAPPSDSSRGGRAPSVSFALEPPARVGFSGIPTVRDYSTSRLITFFSSSSAKASLKKNITNFF

SEQ ID NO: 37300 - protein, 32 aa, Homo sapiens
VIRAFMVPTLWMVSGGDLLSLINELHSCCFPS

SEQ ID NO: 37301 - protein, 34 aa, Homo sapiens
MKIHLPLSWLLMGVGVLLRFPGWKIISPGPSYIS

SEQ ID NO: 37302 - protein, 45 aa, Homo sapiens
LAGPRMSDEFGFSWGLCWHPAKLLPAGLSVLGCLGVGPIRRGGDR

SEQ ID NO: 37303 - protein, 79 aa, Homo sapiens
MALGLPLRACGLWNMSSRLCSAELLFCKETQSSLNLATEIRDSGALSFLGMDYGPVPHLSGALQMSWRSIGQRTKIHSR

SEQ ID NO: 37304 - protein, 123 aa, Homo sapiens
MEKPERQESAKHTKDWAVTGENTQPACTQVKYTALLLTQSLFGGFFTRMHVTFGAEDPGQEDSFGRPVPCCRPHSVRRSTYDLRSSDQPAQGTSCQFQIGLSESAEKLPPISSLRVQAWLPAF

SEQ ID NO: 37305 - protein, 126 aa, Homo sapiens
LPDYSPTLHWCLITTGMPALVIHPHSLGDKSIAGTPALAAHPHCSPGLLNAPRCPTRLLRASTLSFLGFTSFTMGNLPPSIPPSSPLACVLKNLKPLQLTPDLKPKCLIFFCNTAWPQYKLDNDSK

SEQ ID NO: 37306 - protein, 32 aa, Homo sapiens
MESPKERSLTLTKHLGDGAPWLGYRADKSGIF

SEQ ID NO: 37307 - protein, 118 aa, Homo sapiens
LMPRVLAGLPANHAAAAAARSCLGAACAPATAGGADAAPDRRKAIPRPRLPAARLDAAASGGRGLRSLPARRVRRAAGLPGGQGARRVRLLLGMRQPRGPALRPGPQCSLLRALRRAA

SEQ ID NO: 37308 - protein, 91 aa, Homo sapiens
LSRSPPTLECYISALIFFFFFLRWGLALLSRLECSGMISAHCSHRLPGSSDSPTSASRGAGITGAPPPPANFCSFSRDGVFTMLARLVPNS

SEQ ID NO: 37309 - protein, 57 aa, Homo sapiens
LGNCLTFYCSLFPRVTPRLVVSSSALFLLYFIHNSQRCWTRMGRPPVAMSPPRCSWG

SEQ ID NO: 37310 - protein, 40 aa, Homo sapiens
MSHRTWPILKFLIPLTLCKMCENPPAVHQPQTKSTFSMPL

SEQ ID NO: 37311 - protein, 35 aa, Homo sapiens
IPFNLLTLLLFEGTYIRAYFAKKEDGCFRSGHRKS

SEQ ID NO: 37312 - protein, 17 aa, Homo sapiens
KPRRRKRRLVGTMGIML

SEQ ID NO: 37313 - protein, 59 aa, Homo sapiens
RNSWPLLPWLLLPATSSLNMSEIRKQPNLSCNRDGHARKQTARACSLVGAELSSRVVAN

SEQ ID NO: 37314 - protein, 34 aa, Homo sapiens
TAAAVAAAAAAATATAATAAGPGPGWGLESLQWG

SEQ ID NO: 37315 - protein, 37 aa, Homo sapiens
MLSFFICLLIFVHLLLLSFLISDWPPPTGSAEHKYSG

SEQ ID NO: 37316 - protein, 33 aa, Homo sapiens
ILTLLLISYLHEYFSLFSVSLKIELPTPKYEIG

SEQ ID NO: 37317 - protein, 24 aa, Homo sapiens
MSFLLYCLSRITAVSSSKGRLLST

SEQ ID NO: 37318 - protein, 45 aa, Homo sapiens
LAAARSSGPRAAVSVSASLGPWVSSSLPFSGSAPSRSVPRFPAGL

SEQ ID NO: 37319 - protein, 40 aa, Homo sapiens
LATSLKWNLLVALLPLQLWCYTEKLEVSKQTREKEKHQKV

SEQ ID NO: 37320 - protein, 77 aa, Homo sapiens
ITLLIMFLKLSAKLIYLSIPSWSESQTSARHGRLCRHSSGKKRELPSPSSRCSPAGPPSPGRSAPLPSSFHFCRLRN

SEQ ID NO: 37321 - protein, 52 aa, Homo sapiens
VFYSKVLNMGVSFFYSLSLMTQQKRNCRPWDNQHLNKLYNYFFKLSYRVIRL

SEQ ID NO: 37322 - protein, 41 aa, Homo sapiens
LPPASMSPPAAAAAASASRARAPASRSRSRCLGHWPPDPRL

SEQ ID NO: 37323 - protein, 28 aa, Homo sapiens
IGMPLPVLLCLTLPMPLPSATARGGNRT

SEQ ID NO: 37324 - protein, 41 aa, Homo sapiens
ILVWLLFLICEFIGLVFCFLGSRLVEKKKGRIHSHDLYSRP

SEQ ID NO: 37325 - protein, 34 aa, Homo sapiens
IISLQGKRVFIALRLKMYSRFSPFSLLLCIFWMW

SEQ ID NO: 37326 - protein, 40 aa, Homo sapiens
IRIPLVLLMYFSIPTPYSGSLASKLRSLAFAPGAGTRGRI

SEQ ID NO: 37327 - protein, 72 aa, Homo sapiens
VSPAELSPVPPTRAVCPWLQPLSPRSPRLPLRPPFSLDELASFLFSAMEFCSVLLALLSQRNPRQQMPIRSV

SEQ ID NO: 37328 - protein, 45 aa, Homo sapiens
MFFCLAVLWAEVVKRPSSQRALMNAVSSSCSPHPITNRLQFFGFF

SEQ ID NO: 37329 - protein, 25 aa, Homo sapiens
LGLSFLLLCFKMANKSWSSESPVQT

SEQ ID NO: 37330 - protein, 50 aa, Homo sapiens
KDIAVSFTTGSMERKRSLQRLNKQHALWYPLFKNCELTTVVVFSFTILMA

SEQ ID NO: 37331 - protein, 18 aa, Homo sapiens
MFPSWPFLWLTLCSLCIC

SEQ ID NO: 37332 - protein, 126 aa, Homo sapiens
MRNRPVRAAAVSTLWALITVPASPHWCWMARSAAASPTRARASMTIWECAGRKWGLTSCAATLGWTVRPPTQSAAACMERPGAWTAPSALRRTQMTSRPCAMCYAPPHIAPRDQVALDSPTSTAQT

SEQ ID NO: 37333 - protein, 27 aa, Homo sapiens
LIKILLESALLVSYLCQISSWETAVTT

SEQ ID NO: 37334 - protein, 16 aa, Homo sapiens
KRSYFSFYFAACLLPV

SEQ ID NO: 37335 - protein, 55 aa, Homo sapiens
RNPARKDIGGGLALKLLFKTRKRRRKRKKRKMLGNIYLTCSTARTLASCCYSCKY

SEQ ID NO: 37336 - protein, 18 aa, Homo sapiens
IVLFFLLAVHFGGYYKEI

SEQ ID NO: 37337 - protein, 30 aa, Homo sapiens
IKQFRPLALIVLAGVVCSRLKRWSEGERRK

SEQ ID NO: 37338 - protein, 35 aa, Homo sapiens
IVFFFSRRGGKLSHYRGPAMLCIWACCMSCCRCLH

SEQ ID NO: 37339 - protein, 32 aa, Homo sapiens
VMFAYFLTGSGVILAHCNLRLPGSSDSPASAS

SEQ ID NO: 37340 - protein, 52 aa, Homo sapiens
TKAPIRRLPHCKTTWLSLCTAMSPLTTEIWALRRGNSSASWSRAASGGRRSP

SEQ ID NO: 37341 - protein, 16 aa, Homo sapiens
IFQFILCLFSGQSVTL

SEQ ID NO: 37342 - protein, 23 aa, Homo sapiens
KTPEATFTMVGIWIILLGMSYAS

SEQ ID NO: 37343 - protein, 30 aa, Homo sapiens
KRMKMKNKWLSFNDACGMCVCAQAIILLRM

SEQ ID NO: 37344 - protein, 28 aa, Homo sapiens
ISLFSLTPTFLFALLSLSHILETVFNTH

SEQ ID NO: 37345 - protein, 71 aa, Homo sapiens
KVPAHGPPLIASPSRPRAPRGARGRRGPAFAAVAAGAATEAAAAAAAAPAPLAPARRAAAAARGPPLPRLP

SEQ ID NO: 37346 - protein, 70 aa, Homo sapiens
VPAHGPPLIASPSRPRAPRGARGRRGPAFAAVAAGAATEAAAAAAAAPAPLAPARRAAAAARGPPLPRLP

SEQ ID NO: 37347 - protein, 16 aa, Homo sapiens
ILIVTLLFSPCVTLEP

SEQ ID NO: 37348 - protein, 35 aa, Homo sapiens
RSSVGRRVLLLSSAASWRSRAARPCTSSFPSRRPR

SEQ ID NO: 37349 - protein, 5 aa, Homo sapiens
ILRVA

SEQ ID NO: 37350 - protein, 32 aa, Homo sapiens
IRRSKTDISSVGGSFFFFFFSHPSGSGRFVIF

SEQ ID NO: 37351 - protein, 12 aa, Homo sapiens
ILLVVSVLWLEI

SEQ ID NO: 37352 - protein, 38 aa, Homo sapiens
KKYIVFFFSRRGGKLSHYRGPAMLCIWACCMSCCRCLH

SEQ ID NO: 37353 - protein, 47 aa, Homo sapiens
LGSGTHSRSPSPGRHNDQDSTELYSHIELTINSAHSTQSVKIVFSCW

SEQ ID NO: 37354 - protein, 98 aa, Homo sapiens
LAPLQRSPEVPAYTRPACKPPVGPHSSSASVPLWLSSGTPAEAHLPLLNSRLESWQDPVAGLGMELSALCVGGLGLCLHPAQGCPSLGSPAWLLLGPE

SEQ ID NO: 37355 - protein, 56 aa, Homo sapiens
KLHKAREITAGGKSMMGSRVLRTGKLLEAAGAGPGSPALAVFAFGRGQSLLFQVPA

SEQ ID NO: 37356 - protein, 41 aa, Homo sapiens
MEYKKTTKAMKKRRMFYLHPISKPLLSCYCMSLQAQYRASS

SEQ ID NO: 37357 - protein, 123 aa, Homo sapiens
MLGDLPEDAHRGKGQAGIPTRDSPLLGRPVRPPRHGPPIPKPLVQISALWDLIAGCGPVAPAGRERTGEETATRLGRRNQVPGLGAAKGDGGGSSGRAGSDLGLLSPRPGISDLSLLRPPPAL

SEQ ID NO: 37358 - protein, 41 aa, Homo sapiens
MGSSCDSRRPQPAKRLQCRRLSEPQPAAPSSFLCHPLQVVL

SEQ ID NO: 37359 - protein, 63 aa, Homo sapiens
MFIGVGPARGSTLPPTSWCWLAPTALTSWTRPSCGLAGFIARFTLVPLTLKAGPPSLRSTCAH

SEQ ID NO: 37360 - protein, 68 aa, Homo sapiens [sequence omitted]

SEQ ID NO: 37361 - protein, 80 aa, Homo sapiens
MTVVGGTCLSLGNRAVHVPAPSGSRSLRRQKRNDDSAYCNYPVDIYLVPVTFRKLFGEYNVNIETIRMVCAFVQNLWIHQ

SEQ ID NO: 37362 - protein, 56 aa, Homo sapiens
MTVVFSLLGTLRAPAPFSSPLQGCRRSRCDYKDFSGIIASSHVRSGWSWRVRENEF

SEQ ID NO: 37363 - protein, 70 aa, Homo sapiens
MAHCCLNLRGSSHCPHLSLPSRLDYRHVPPHPANFSSATFSNHLSALTSQVLHHYWFTETMHFTRPSIPK

SEQ ID NO: 37364 - protein, 110 aa, Homo sapiens
MSGFREKLLRACWRRHFSQKSPCGAGVRGVPGPTNAGRPPSTRASAHVQLLNCPASELLWKMSLYMKKSASGQSQAQWIAKMWKSPRFKLQENRSMESALSCWGITDAFD

SEQ ID NO: 37365 - protein, 49 aa, Homo sapiens [sequence omitted]

SEQ ID NO: 37366 - protein, 57 aa, Homo sapiens
MWLLKPSAHSPVHILVLLFPRGWSQPGTHKRQILVNAASLPGGCLLPWIWSGAALRF

SEQ ID NO: 37367 - protein, 41 aa, Homo sapiens
LSFPAGHKAFCCRRGDWRPSLLIPLIFQFILCLFSGQSVTL

SEQ ID NO: 37368 - protein, 55 aa, Homo sapiens
IQMQRNMEGIRDWTTALTFFLRLLNIMGVPILFWCTFQAEWPSSFRMWICRIEEA

SEQ ID NO: 37369 - protein, 38 aa, Homo sapiens
IFIRDKMGKKHHIGGTTRILTFLVVCILGSLLCSSRET

SEQ ID NO: 37370 - protein, 24 aa, Homo sapiens
KIPNLLFCFISPLGVVRRSSPCYP

SEQ ID NO: 37371 - protein, 30 aa, Homo sapiens
MLGAFVWPSLLLLAGKEEHQTTDPGRHFSP

SEQ ID NO: 37372 - protein, 34 aa, Homo sapiens
MLIPEILAFVWPSLLLLAGKEEHQTTDPGRHFSP

SEQ ID NO: 37373 - protein, 19 aa, Homo sapiens
MRSRNIFRVLFYLLAFFRE

SEQ ID NO: 37374 - protein, 118 aa, Homo sapiens
MSGMKWSDERARRRWREAENLMHILEAKSTRLADGLKAEDFAIEKSLAFQSLQFGNQPTNQSTNQPTNQLLNRSTDSSRRQRLENCLNLVQRLKQSNTVSCTDLNSVKTVPHAVGSQP

SEQ ID NO: 37375 - protein, 44 aa, Homo sapiens
LSYSMGASAGNSKVGFDKLRPAGGAHRVLEVHVCFHEDLSARSR

SEQ ID NO: 37376 - protein, 87 aa, Homo sapiens
MVTNPCSLLPLLLPPQTKSSTCTVLLAKKKLLYLSTGPHGLTETPNQELILQISEGRTLILTSFSSGAQEKEQQGERKKQHLPREAA

SEQ ID NO: 37377 - protein, 29 aa, Homo sapiens
METAAQVRIRTAVFQSGDSGHNYFCLFLS

SEQ ID NO: 37378 - protein, 46 aa, Homo sapiens
MASSVTTISLLLLASFTSLSCVWYFMFSCQDCVDLQILSLPDEVTC

SEQ ID NO: 37379 - protein, 14 aa, Homo sapiens
LLALFILVTVPEFS

SEQ ID NO: 37380 - protein, 13 aa, Homo sapiens
MLCLGWSLESWSL

SEQ ID NO: 37381 - protein, 74 aa, Homo sapiens
MQNSSLFHRGTDFLLLLPFALSPPPPGKKRRRRRSAGIATGRATEAVRKVSVWECGTGAGLVYCSEQWSQPSGR

SEQ ID NO: 37382 - protein, 51 aa, Homo sapiens
MIAALSCAWSTGHLQFGLSRSKLVFCLSCVCWEEVTWDSTTIDEESEKVFY

SEQ ID NO: 37383 - protein, 326 aa, Homo sapiens
LLQRPSPGPAPLPEVRRTARPAPGSGVFTGCAASPARRTGVARGRWWISSPHLSSPSKVKLLFSPPTRAWQLISGRWASPRPRGPRPAAISAAHPAAPPCRAAPQPKPPRRDVEPAPQSCIHPPRTSPSKARPGPPRAAAAVSHPCFVKHTLCHFRPHLPVAMGVFYVDTSRDTESLDFELQIVGVGVSAALPGRMEGASASILTFLLKELAKHQEFSLRLLSGPLSLRGEKFFRKVSSFLFIPRDHFTHPFFASRVDGTVERGNPALWLCLSSPTGTRATKATKDPTLSSVQASQLEEARRQRPRGHQEAFEPAERAWEHNAEPL

SEQ ID NO: 37384 - protein, 40 aa, Homo sapiens [sequence omitted]

SEQ ID NO: 37385 - protein, 44 aa, Homo sapiens
VTFIRVILQPALSENCQFFFFFFFFCQKIVSSIVTSMLTSLVLY

SEQ ID NO: 37386 - protein, 31 aa, Homo sapiens
MQFGLMALMYSHCAFLFLSSFSSTPPSTPPH

SEQ ID NO: 37387 - protein, 37 aa, Homo sapiens
MPVVCVLFSLFLTCVHDSFDSASKSKSCVVTGAFIYL

SEQ ID NO: 37388 - protein, 33 aa, Homo sapiens
MESLFLFSILFVRVSRPLFTNSLQLERSFPKIW

SEQ ID NO: 37389 - protein, 24 aa, Homo sapiens
MLSLGIFILLCLSSLIFASSCSWQ

SEQ ID NO: 37390 - protein, 27 aa, Homo sapiens
LVADRTASSIVCLSGLVCTFHFQLLQM

SEQ ID NO: 37391 - protein, 19 aa, Homo sapiens
LGILMFVIVFLTVMKKYVL

SEQ ID NO: 37392 - protein, 41 aa, Homo sapiens
MKTFMMIQFHLIVGVQWCDLSSLQPLPPGLKQSSHLSLQSS

SEQ ID NO: 37393 - protein, 41 aa, Homo sapiens
MKRRMEKSLLKPLASCLLLGSLLFFWPSSSSSSTRSCVLKR

SEQ ID NO: 37394 - protein, 51 aa, Homo sapiens
LAFIFLRWSFALVAQAEVISAHHNLLLLGSSDSPASASGELGLQACTTTPG

SEQ ID NO: 37395 - protein, 86 aa, Homo sapiens
LPGLQLCLSLSSPPAPPFPAVPGMVPGTPRTPRLREVRGLAGEGVWGWSAARGAGCIFSSFYGLPHLCIPSSLNLTRSEQWTASSL

SEQ ID NO: 37396 - protein, 34 aa, Homo sapiens
LGFSSLHSTAALVIATCLLITEESQVLRRGRNTH

SEQ ID NO: 37397 - protein, 30 aa, Homo sapiens
MRSTATTLSSATASPSIGASPTTGPESADR

SEQ ID NO: 37398 - protein, 50 aa, Homo sapiens
LRPCVTLFPLYPFALSAVSSGGNHPLPRLLDPFAEALARARVIPVLLTQA

SEQ ID NO: 37399 - protein, 79 aa, Homo sapiens
MTTFEERSKHWNHQHSMLTEGGHQLHQPPNSTEPLENPGAQTGNSRDLIGVYWRLYSSQRRWKPRKDTFWRLALAPGTQ

SEQ ID NO: 37400 - protein, 61 aa, Homo sapiens
LEVILQSKKMETKKGHILEISTGSRNPVNRRLRLKACAFSPEKIHLNSEQLRTLGKKDFTW

SEQ ID NO: 37401 - protein, 107 aa, Homo sapiens
LVFAAVKTLSTVTYFLSQAASHLVPCADSSTVARIQYESRGDRRMVGAAGFSTYPSHQGPDALPPAPSAHPCAQLEGCMARSPLFRWVETLMIPAPPCRAPATEQAL

SEQ ID NO: 37402 - protein, 54 aa, Homo sapiens
LTRHSATVIPAGEGPKHLHLCASRGALWWPLKMLRLYHALEHLPGQGICCMTLS

SEQ ID NO: 37403 - protein, 48 aa, Homo sapiens
LQNWLSQVAAVSAASTVNSKTTLPVLQAGKLLNQEAVLMLLTAPEVRD

SEQ ID NO: 37404 - protein, 51 aa, Homo sapiens
MLFFTTNFVLSECLSYASCNAYFLISNVSIKPFFRYKENYFKLSNSEKLKI

SEQ ID NO: 37405 - protein, 72 aa, Homo sapiens
LKNTLCPSLFLCFWLLKIRDYFNLKKHTNLPCSVCPFKVMWKHKTNVFYVEQNILCAFSFCGSMGNYGLFFK

SEQ ID NO: 37406 - protein, 44 aa, Homo sapiens
LRQLQEGCMAGKKLLKTGWVSWLVPVIPTLWEVKLGGSLEGLTL

SEQ ID NO: 37407 - protein, 35 aa, Homo sapiens
MKPLGIPLCFAWLIPCQFQIFTSGQLQGGYPCPSS

SEQ ID NO: 37408 - protein, 73 aa, Homo sapiens
VGCHCTFFNYSSLVEKIPLLNFFFIEYSPSAPEYHIEFSCILELLFYQSLPVFCITFLLSKSTVWFLLIMDID

SEQ ID NO: 37409 - protein, 26 aa, Homo sapiens
LLHFLTCLLLVGTVHKYNLLFHFSLK

SEQ ID NO: 37410 - protein, 35 aa, Homo sapiens
VAAVAVAAVAAAAAAGRRAERASGFRGSGEGGCSS

SEQ ID NO: 37411 - protein, 31 aa, Homo sapiens
LAKRLRAVLAFAATWLGQLTQVSCLPSSACL

SEQ ID NO: 37412 - protein, 66 aa, Homo sapiens [sequence omitted]

SEQ ID NO: 37413 - protein, 85 aa, Homo sapiens
LFSFQLVFFYISFIGHFPISNSEVSPREQHKANNIKHNKNANKYFIFICKRIHQKEALLITPNVKSFVLIKNLIIISCQQMARKD

SEQ ID NO: 37414 - protein, 11 aa, Homo sapiens
VKWIVFWFIVT

SEQ ID NO: 37415 - protein, 44 aa, Homo sapiens
LGNRLWKLCWGTYVFLFILCHHCLHHAKSACSHNCGEFLLVLFH

SEQ ID NO: 37416 - protein, 11 aa, Homo sapiens
VASVLFAIFVV

SEQ ID NO: 37417 - protein, 37 aa, Homo sapiens
LKIPKKKKKKKKKKVVTIAFSVSYLFWFAETSPKQEI

SEQ ID NO: 37418 - protein, 90 aa, Homo sapiens
MFSLAFLNCGQCLLISSSFPFGKADITLSMLGECTRTYGSGKIWYLLAYTQNDHSPTSVQGKAGFPWRGSHRTSCSSPCAVCLERGPRPY

SEQ ID NO: 37419 - protein, 8 aa, Homo sapiens
LLAVFFWI

SEQ ID NO: 37420 - protein, 35 aa, Homo sapiens
MKPDSANVTTWCYFFFFLLTATNPRNISCVPHCPI

SEQ ID NO: 37421 - protein, 237 aa, Homo sapiens [sequence omitted]

SEQ ID NO: 37422 - protein, 38 aa, Homo sapiens
LLPMCSLLSLATHHPLPQVRRVQCVILTHLCPHSLAPA

SEQ ID NO: 37423 - protein, 68 aa, Homo sapiens
LPSERSLCLRSLTILILSSCWMSFTQKINSTWFLNFCTKISRNSWMPLLSLAFLFPSSRAICSSCSRA

SEQ ID NO: 37424 - protein, 37 aa, Homo sapiens
MVMCLCILSPLCIASKSLRVCTKSYMKAMGKPGCQWF

SEQ ID NO: 37425 - protein, 70 aa, Homo sapiens
INNQVVQLLLKPVLGLFQFIISGRLLLVLLGEVLDLLLEPLLPLFQSFHGAGKVLQLLLRVGELQGQRPG

SEQ ID NO: 37426 - protein, 50 aa, Homo sapiens
VAAWEGFWQCRGLSFSPFPSLGLSFSLAALGWSLRARGDCQRCPLSVTGP

SEQ ID NO: 37427 - protein, 28 aa, Homo sapiens
LSLAAAGTPGLVFTALCPLLLEAQPLVL

SEQ ID NO: 37428 - protein, 32 aa, Homo sapiens
LKGRMFISLWFICPRIFTAMAGTKGKRWSPTS

SEQ ID NO: 37429 - protein, 122 aa, Homo sapiens
KHLPVHSSPTPRLTPLWKLQARWLLPQLVYLQGWGSYSLLRPAALISMVLLAREFLYPAKMSVSEVCSSGLSSPLLEQHKTNLIFYASGDICSANGKSGFNQPLPFLKTFCCTHRILSCTYL

SEQ ID NO: 37430 - protein, 9 aa, Homo sapiens
ISSVWVVVL

SEQ ID NO: 37431 - protein, 16 aa, Homo sapiens
LRFEVNFFYTLLMLIF

SEQ ID NO: 37432 - protein, 56 aa, Homo sapiens
MAGTASAPRPPSGSPGRPSGCRATGLTSLLFIPTGRSSAPSLRPHTPRVILPKCPT

SEQ ID NO: 37433 - protein, 52 aa, Homo sapiens
MRFSVNAAHPHCLCLMTSSGCLCENHAVTTSSPTADDSEWTTYSAQSRNPSL

SEQ ID NO: 37434 - protein, 51 aa, Homo sapiens [sequence omitted]

SEQ ID NO: 37435 - protein, 155 aa, Homo sapiens
MPLQCLPGVAMAAAGSPAAPRFPLASPSCSRYIPPAPASPTTPLASRMGRVPAVAVAPHRRTPTPSIATHAPGETARNQSWSPSIPLSWGRAVLQSLSCCVLRSPEQWGHLGLDPAFHHLAPPRPLSLKVWCCTRSPPHCHQLLCRDPRREEHFF

SEQ ID NO: 37436 - protein, 24 aa, Homo sapiens
MDLKWAIIIYLIFLMDYSPGYFPP

SEQ ID NO: 37437 - protein, 16 aa, Homo sapiens
RITKETGSFHILILVM

SEQ ID NO: 37438 - protein, 62 aa, Homo sapiens
MEQDAHYCLVLLPLSRLAVGLMPVRRSRLAAKLSWSQAVTLDLGSHWPSICIQKASLCLLAA

SEQ ID NO: 37439 - protein, 34 aa, Homo sapiens
RFLFLLPFCLCSPNVPVSPLPHLGPLFGPCGQSC

SEQ ID NO: 37440 - protein, 79 aa, Homo sapiens
RMKRTPCGRMWSVTGTCSAAISTLPSSRPTCVSVRSLMSRMKMKCLMPLCCHPRSTEQAGCWTFYIPRGKGAMWSSWRA

SEQ ID NO: 37441 - protein, 32 aa, Homo sapiens
LQTARGPTCLPWLSMSLATPWAWATPQPPTPL

SEQ ID NO: 37442 - protein, 55 aa, Homo sapiens
KTDGHMCQWGSLSPGPKKQGTKFKTLASSQPLKPWPPEFPFLSLSFYFFYFYFYF

SEQ ID NO: 37443 - protein, 52 aa, Homo sapiens
IRTKKSRMHIRSPAHPPDPHTPMMSWTMASSHTAPLLVSLASPPADSESRIG

SEQ ID NO: 37444 - protein, 69 aa, Homo sapiens
MQRLPAAFFRSFAAQGLGESVHINTPTSLSLRGRPFISSSGPGARARVTCAPCLHAARILCCFWRGLHR

SEQ ID NO: 37445 - protein, 72 aa, Homo sapiens
MNRLAAVRWGHSLLLSGCLTVPCPCLTGPSISAGELSSADKPAWHGALPLLLVPDPFCPEENFLSPGDAWPR

SEQ ID NO: 37446 - protein, 161 aa, Homo sapiens
MPVGSLPHPGCLWAAFLTLDACGQPSSPWMPVGCLPHPGCLWAAFLTLDACGQPSSPWMPVTWFPWGLPKLRDPKPPSNLMTRLVSEHTCVVPEPLTNPLCNPAHAFPILKGPAHRPAHVFPLPLLCPYLVGSCPFWALVWHFTHKCVLWVVSGPPPAVRG

SEQ ID NO: 37447 - protein, 47 aa, Homo sapiens
LFPRVTPRLVVSSSALFLLYFIHNSQRCWTRMGRPPVAMSPPRCSWG

SEQ ID NO: 37448 - protein, 47 aa, Homo sapiens
VWSWIQPPWLASLSLMSLPLCSLLWESSALLDMRLEGCLGLPTHKLC

SEQ ID NO: 37449 - protein, 45 aa, Homo sapiens
LGPFRTLFAHKLPKKKEPTCWYCWLVSLWSTSLLLLCYLLAPLPM

SEQ ID NO: 37450 - protein, 23 aa, Homo sapiens
VSTPLLSFLATLLQSSTNYPCPG

SEQ ID NO: 37451 - protein, 45 aa, Homo sapiens
IPLLLAPPPAGESKKMTGTVCWHLVWWFSSCFRIQSLWMMTASKW

SEQ ID NO: 37452 - protein, 65 aa, Homo sapiens
KMSFTYIWWTQQGRMSTAFCPIHSSLGSMVMCLCILSPLCIASKSLRVCTKSYMKAMGKPGCQWF

SEQ ID NO: 37453 - protein, 30 aa, Homo sapiens
TWGEIISLSRPCYAVYLGVLYVLLPMPSLK

SEQ ID NO: 37454 - protein, 20 aa, Homo sapiens
VAGGTASALVAPLSPLPQPR

SEQ ID NO: 37455 - protein, 82 aa, Homo sapiens
MLQPFGPSFPLGLFPPLDSLSQNPLSPSQAGDSPLATEGRLSVSWTLCLPQKRSSSSRGLPHTGASYVRASQRTSGRTGCAP

SEQ ID NO: 37456 - protein, 32 aa, Homo sapiens
LSILGTNMLLFPLFLLLSLDLCQKEGYAESLI

SEQ ID NO: 37457 - protein, 45 aa, Homo sapiens
TWGLRYVAAALSFISTSQTFDLPTLSSLLMKLKLLCDAYCPRSFC

SEQ ID NO: 37458 - protein, 86 aa, Homo sapiens
MDWQGRLPWAGCTGSASCATLTARKSQIPASVRSSSWRWQSSWSQKAGRMQVMSTSALMTVGWLPKEIQKADFRQTLSAFLMGFAS

SEQ ID NO: 37459 - protein, 38 aa, Homo sapiens
MRLPTLLPSSPWPPLACPPVLLHQPHCPPSAPPTLWSF

SEQ ID NO: 37460 - protein, 57 aa, Homo sapiens
MTTGPFPEFSLTELLSQEERLKPAHIPGQILQTVVCSVSPTDFVPGHCMFFKPTEFP

SEQ ID NO: 37461 - protein, 40 aa, Homo sapiens
MSDEFGFSWGLCWHPAKLLPAGLSVLGCLGVGPIRRGGDR

SEQ ID NO: 37462 - protein, 28 aa, Homo sapiens
MCIYIGWQWSNTDCFLTKISQVLGEAGL

SEQ ID NO: 37463 - protein, 110 aa, Homo sapiens
MPALVIHPHSLGDKSIAGTPALAAHPHCSPGLLNAPRCPTRLLRASTLSFLGFTSFTMGNLPPSIPPSSPLACVLKNLKPLQLTPDLKPKCLIFFCNTAWPQYKLDNDSK

SEQ ID NO: 37464 - protein, 56 aa, Homo sapiens
MPATPTFQDSSSLMKVSIPPIKSVSDNTNIWVISGSVLLCLFSPPSCFVVCLITYC

SEQ ID NO: 37465 - protein, 36 aa, Homo sapiens
MKMELKFIFPLHMVSPAVSRVFCSSLPASQSFINGR

SEQ ID NO: 37466 - protein, 39 aa, Homo sapiens
MPQALRGTQSAGAAGWVAAASSSGRLGSNIRNKCRQGPA

SEQ ID NO: 37467 - protein, 88 aa, Homo sapiens
MPPWPRGLSSGWRSCWWCSSGRSTWSASGPPAAAASTWASGGGCALPGSPFPSSTSSWSWPPWWSSAWAPRGRCLPRRPSGASASCRS

SEQ ID NO: 37468 - protein, 20 aa, Homo sapiens
MRALFRVYMFSTLFLASGNE

SEQ ID NO: 37469 - protein, 49 aa, Homo sapiens
MQGSGHRVQTGSLIVSATGLRPAPTWSAGATRLEQSSNPLLLGKLPGSR

SEQ ID NO: 37470 - protein, 165 aa, Homo sapiens
MEICHFGQVLLTVPVTSPRRRATTSRPHDPSDCHHTGPRRRISMAFLTLCLQRISFFIVFFFFFYFLFSFFFETESLSVAQAGVQWHDLGSLQPRPPGFKQFSCLSLPSSWDYGHTPQRSANFCIFRKDRVLPCWPGWSRSSELVIHLPRPPKCWDYRREPPHPA

SEQ ID NO: 37471 - protein, 28 aa, Homo sapiens
MRGTRESPREPAKSLAAASRAAAAAAAA

SEQ ID NO: 37472 - protein, 48 aa, Homo sapiens
MLGQRHSVSSRPSKGLDRLFSLLLPVGLFLKRMAELPTCSNTIRTKVA

SEQ ID NO: 37473 - protein, 71 aa, Homo sapiens
MEPLVVSSLLRAQASRQAHHPPAQEACGSRGALSMAAPLRHLRPPKSAARWMRTMALEKKCRRKASRFQLQ

SEQ ID NO: 37474 - protein, 44 aa, Homo sapiens
MEPLVVSSLLRAQASRQAHHPPAQEACGSRGTCTAPSLRMTWIQ

SEQ ID NO: 37475 - protein, 32 aa, Homo sapiens
MPGWQQWSSLGRFCSSMSTLGLSSPATATSST

SEQ ID NO: 37476 - protein, 38 aa, Homo sapiens
MLSLQGLRPSLSVQDLKQIQSQEERFQERENYSYHRGF

SEQ ID NO: 37477 - protein, 73 aa, Homo sapiens [sequence omitted]

SEQ ID NO: 37478 - protein, 94 aa, Homo sapiens
MRPGSPLAQRDSGQGRGRSGVASCSRGGWAAAAAAAAAAAAGAAAETMSGQRRGLPPPPPPPRAGSRDGPVARTSSASASASTSGRAAAARRLC

SEQ ID NO: 37479 - protein, 51 aa, Homo sapiens
MQAARRGRAEAWPCHGRPGLTLPLSRRPEAPAPHLGTLGPDSGQLGEKLTA

SEQ ID NO: 37480 - protein, 52 aa, Homo sapiens
MEPGHPHSSCPADAGLVEGGRQQEQCFLGLCSQSWPCCSLRLPAAQTSSWSS

SEQ ID NO: 37481 - protein, 26 aa, Homo sapiens
MVKKGFPHAASLSPAPLATSQDLGCS

SEQ ID NO: 37482 - protein, 19 aa, Homo sapiens
MKFIHDLDRTERRQVWTGQ

SEQ ID NO: 37483 - protein, 101 aa, Homo sapiens [sequence omitted]

SEQ ID NO: 37484 - protein, 24 aa, Homo sapiens
MALLAGWIIELSGGTDAAAIPNKS

SEQ ID NO: 37485 - protein, 42 aa, Homo sapiens
MSLKISKSYEIWDIFCTGCVCLCQFLININVGQSCLFSISKF

SEQ ID NO: 37486 - protein, 148 aa, Homo sapiens
MEEKIQVPSWKCLWLKRDEDEGPWKEEEPARKIIPLARLASASSSQCWLFLVSQDFIGVLNTGKSKSKATTDSTSGESYSLLTRWHFLTAFSHRRRDQYCVLPWWKGKKEPNRLPQDLFFSFLFFFFFLRRSLALSPRLECSGAISAH

SEQ ID NO: 37487 - protein, 60 aa, Homo sapiens
MRASRWGCCWLRGAEGQREREPARGGGRTHPDLAAAWARSSPFLSVSLSAPLYFLLALRL

SEQ ID NO: 37488 - protein, 39 aa, Homo sapiens
MIRAPCTCLWGILWPMRNGAGHSWRRRCKGKLSSFSRMA

SEQ ID NO: 37489 - protein, 56 aa, Homo sapiens
MDINPGSPDSGSQSGFFSHPISPWFHRTLRRLLGCLTLTLSGRILNPSWVSSTGMP

SEQ ID NO: 37490 - protein, 133 aa, Homo sapiens
MKGARIPHHLAQVEAPATLGEAAAHSRAAVAVAAMVTTTMAAAVVAAAVAAAVAAAVAAAVVAAVATVVAAEVTAAVSPPGDPAPAPPPATTVGAAEEMDINPGTLRRLLGCLTLTLSGRILNPSWVSSTGMP

SEQ ID NO: 37491 - protein, 21 aa, Homo sapiens
MLTAVSQPRPFLHMLPGTWTL

SEQ ID NO: 37492 - protein, 76 aa, Homo sapiens
MRKLVPNVSEDQQLLRQRLRGNPTLPEGPTAPPAGHFPPLREATGAGLRHSECVESSITTSWQRTELQPSYMRHRE

SEQ ID NO: 37493 - protein, 85 aa, Homo sapiens
MREQAAHQDFYGNLLLETAAAAAAAAARGLPAAGAEVLAARAPRPLPTARRDAHSPSTRKEVPSPVTGSCRVQIYTELHNQPKTT

SEQ ID NO: 37494 - protein, 34 aa, Homo sapiens
MQTWFQKFVFFWWVQLGLESPVFSIQSSLFFMAM

SEQ ID NO: 37495 - protein, 45 aa, Homo sapiens
MGFHHVAPAGLELMSSSDSPASASQSAGITSVSHHSCLYTSKGVE

SEQ ID NO: 37496 - protein, 106 aa, Homo sapiens [sequence omitted]

SEQ ID NO: 37497 - protein, 24 aa, Homo sapiens
MFSRLAQRGSPELPAATWKPQKGK

SEQ ID NO: 37498 - protein, 37 aa, Homo sapiens
MKLASYFSASSFTQLSLLPNIFLITLLCCLLVSHFDI

SEQ ID NO: 37499 - protein, 27 aa, Homo sapiens
MAAAVAAAAAAALGARSRDRRREKQNL

SEQ ID NO: 37500 - protein, 47 aa, Homo sapiens
MSRAFMRVLMIGKSILRMWSPYVTALLSILSSVSGASLQNVKQRSTH

SEQ ID NO: 37501 - protein, 61 aa, Homo sapiens
MPRPASARARCAHTLACAHCLALPSEMNPVPQMEMQKSPVFCVAHAGSCRPELFLFGHLGS

SEQ ID NO: 37502 - protein, 47 aa, Homo sapiens
MVREETTYKRQVHFTDGKSEAQIGEKTCPSAWYEEKDFIMSLSDRRK

SEQ ID NO: 37503 - protein, 45 aa, Homo sapiens
MGNAAWAASASIPRMAWPATLPTTAAGSPRTWLRNSAIYTTRSIT

SEQ ID NO: 37504 - protein, 53 aa, Homo sapiens
MDLCGPRQEWPAWGPSELPRPFLLLPLSLCFAWLSKLTQLQDIRTPGSLVLGL

SEQ ID NO: 37505 - protein, 55 aa, Homo sapiens
MHPQEGHALRSPPRRWLLLTWCLGPWHSGGARGQGAGTWGPTWSCPATRSSSCCS

SEQ ID NO: 37506 - protein, 29 aa, Homo sapiens
MGLFLPAPISLTPGSVRHSPASCGNHLKF

SEQ ID NO: 37507 - protein, 32 aa, Homo sapiens
MTMATMLFLVSLGIVLAVERKASVTSRNSPII

SEQ ID NO: 37508 - protein, 33 aa, Homo sapiens
MGAGWPKFSPEDRSGCFNRSWGCVTTAPSKASG

SEQ ID NO: 37509 - protein, 127 aa, Homo sapiens
MPRWLLLSLTFAGLFPLRRRQLLGSCGGREGGGPDQPAGSPAPLRPPLPRTLRLRKYRGNPLPPEVRGSLPEGAPWSRAPLGGHLEARCGPRTREERAAGAAATAGGGAGSPGAAEGRPVLHMLPLG

SEQ ID NO: 37510 - protein, 77 aa, Homo sapiens
MRPSPLSGILADPLFLFPFSEGLPRRRAASRSRLQTPSARCSPRPDAEVAASQKLGPLHPPSEKGAMLISGSTKGPS

SEQ ID NO: 37511 - protein, 25 aa, Homo sapiens
MIISAPCHLSCTSFLMRSLCLQFQE

SEQ ID NO: 37512 - protein, 28 aa, Homo sapiens
MCLWVLICPAIFTSNQEVELPLVFLLGT

SEQ ID NO: 37513 - protein, 84 aa, Homo sapiens
MVLRRAQLRPSLSEGQHPASRNPAFSGSTTAFSFPALSLSSPSSSFSSSSSSCSPPLPVLPSRTPGDRRSSLTPLKRQQQSPYP

SEQ ID NO: 37514 - protein, 52 aa, Homo sapiens
MAPGHKPRSAPVRAVPRPRGAGFGGTASPLSLAKPVSLQSCGCSFPYVCNRL

SEQ ID NO: 37515 - protein, 53 aa, Homo sapiens
MVQHAVWWHPAGFTSFLPTFWPMQSIRPFSVALGWIGPIVVIYGYCLIYLLQY

SEQ ID NO: 37516 - protein, 21 aa, Homo sapiens
MLNIGLFLQLRCIALTNQGLS

SEQ ID NO: 37517 - protein, 35 aa, Homo sapiens
MFCYRDPRYQIAPGLIWGLGICHSAVQTLIFFSSF

SEQ ID NO: 37518 - protein, 37 aa, Homo sapiens
MKNLLSSFFLTFSCEIQKGHIVSGHSKKERKKKKKGI

SEQ ID NO: 37519 - protein, 76 aa, Homo sapiens
MATLYLLIYSFCIYQMESHSVTQDGVQWRDLGSLQAPPPGFMPFSCLSLPSSWDYRRLPPRPANFCIFSRDRVSPH

SEQ ID NO: 37520 - protein, 52 aa, Homo sapiens
MATLYLLIYSFCIYQAMVQDPLEHAQLSYGKNKNTTFALLYTQNQQLFLRFA

SEQ ID NO: 37521 - protein, 34 aa, Homo sapiens
MATLYLLIYSFCIYQSCFHDFPVALSTFTSLYDC

SEQ ID NO: 37522 - protein, 33 aa, Homo sapiens
MYPQQPELPDMSVIAALLIILPTADPFCETPGC

SEQ ID NO: 37523 - protein, 25 aa, Homo sapiens
MKWFPSMATLVQISPTLKSSSSWKA

SEQ ID NO: 37524 - protein, 51 aa, Homo sapiens
MVAGAAAAAAAQPSVRCCSLRGVLQRTSPIYFCSRLGLSMCLLPPARGFDI

SEQ ID NO: 37525 - protein, 49 aa, Homo sapiens
MPSWTRLTSHLAAPCTCCVPTPLVVGTLLSGLLVWGRPLCSFTVPSGFP

SEQ ID NO: 37526 - protein, 94 aa, Homo sapiens
MEEYRAGYGLGCLANTASVSLLLTLWLLGTKGQTGKSLETHSQFVAVPGMLRCCCCAPGPCCPWLPCRPGPARKGNWHAILNCSDWDGRGGEQC

SEQ ID NO: 37527 - protein, 72 aa, Homo sapiens [sequence omitted]

SEQ ID NO: 37528 - protein, 36 aa, Homo sapiens
MRLRQSYMQKLKMPGRFLVSFTTYPAFLHRCQIWMI

SEQ ID NO: 37529 - protein, 31 aa, Homo sapiens
MGRASVSPAVTTGTVSTSQSAWPRNRKEGSQ

SEQ ID NO: 37530 - protein, 54 aa, Homo sapiens
MSRSPFLGHGCTWRVTFLNLLCTVLYCQCAVFVLLREKLCPRTLGRTKRQCTFV

SEQ ID NO: 37531 - protein, 115 aa, Homo sapiens
MKLSAAPRVWQSLIFKSPCPLRLLPPAGPGSPRLRAPAPHRRFAPRPRAPPRPPPRLCFRLLLLSLLFCVGPDSAPETSHPAASDCQGSLTPRETQHTAILSGCREKAVRQLQPW

SEQ ID NO: 37532 - protein, 31 aa, Homo sapiens
MYLVTCFQAGSLSGPLAWGKPPHLLRVLFRV

SEQ ID NO: 37533 - protein, 35 aa, Homo sapiens
MTMRLTCSLTVLLGLSWKEKTQIHLRIWKQMKTPF

SEQ ID NO: 37534 - protein, 50 aa, Homo sapiens
MLPFYMVLVWSTSIIMHFSGQLKHFRRCFMLIPAFVEPRKFIYDLGLCSK

SEQ ID NO: 37535 - protein, 74 aa, Homo sapiens
MVHHPGNPLGLCSISLLLPVLWSRGTTASCPGIATRVSWTGSMGAWTPVLQAMGAPTVLPSSLGSSGCWKVWWS

SEQ ID NO: 37536 - protein, 73 aa, Homo sapiens
MTLFPAPFHFFLLCSYVSIPPCKAFQISQEGRCKQKKEKQPTTKDNQGSQQKCGISQDFKPWKIKAINSRKRC

SEQ ID NO: 37537 - protein, 62 aa, Homo sapiens [sequence omitted]

SEQ ID NO: 37538 - protein, 26 aa, Homo sapiens
MFAVWRALSLAVETSVTLGRVYFFDG

SEQ ID NO: 37539 - protein, 110 aa, Homo sapiens
MRGQCLFPGSQGLRNSGRSTHPSVEAVTRATLFASGSRRVIPELAIRTEFQARAQRPSSPALCMDQTSKIPSPRKSGSMCVTAHRRANVLRLPMEVRPVVAMESTRCHFG

SEQ ID NO: 37540 - protein, 109 aa, Homo sapiens
MAVPCGAPTSWPLLSTVACARAPRSCKLQSPGNRWAVRPAGAGRSRAPRSGCALPGGAGRLWAAGKRSGGEGGRRRRVREEKAPALAAPLAPLSWDVPQWHRLLSFLLS

SEQ ID NO: 37541 - protein, 85 aa, Homo sapiens
MGNQGSSGGPHPTEEMRAWGMPQESRLLQETHQAWRPSTGPSPDTAVLASASWRCRGAQFPQLLGEGQEGWSQSALPLLLTAEIK

SEQ ID NO: 37542 - protein, 22 aa, Homo sapiens
MYRIVNLILDLPALVIVTHASV

SEQ ID NO: 37543 - protein, 150 aa, Homo sapiens
MKGARIPHHLAQVEAPATLGEAAAHSRAAVAVAAMVTTTMAAAVVAAAVAAAVAAAVAAAVVAAVATVVAAEVTAAVSPPGDPAPAPPPATTVGAAEEMDINPGVKSQGMKPAGAGNLGFRTLRRLLGCLTLTLSGRILNPSWVSSTGMP

SEQ ID NO: 37544 - protein, 59 aa, Homo sapiens
MPAAWPGAAAPWRCSLASASSGCAQGCGVRIQRSGWWSISWILPATTSLSAQPPMALSW

SEQ ID NO: 37545 - protein, 79 aa, Homo sapiens
MDLWCSVVQLLCPPLPADQLCQHANPRGHCHRPLLCCPVPHGVPHEDHREPGCDGTCLHLASLAHRLPATPVWLVIRGV

SEQ ID NO: 37546 - protein, 56 aa, Homo sapiens [sequence omitted]

SEQ ID NO: 37547 - protein, 72 aa, Homo sapiens [sequence omitted]

SEQ ID NO: 37548 - protein, 51 aa, Homo sapiens
MDVTDTLFSLIFEKQARCPAHHMTPSILLLSAHFIGGIHHTWYSQSTESMR

SEQ ID NO: 37549 - protein, 76 aa, Homo sapiens
MTGPVSVHSLVPGERGGTPTPSWRSLQRCSSGPIRDLGCLCVLWSREFATWSHFVTQAGMHWHEHVSLQPQPPRLK

SEQ ID NO: 37550 - protein, 34 aa, Homo sapiens
MIQKREPGMLCSSLPVGSGEAGGVAGLDGRHENS

SEQ ID NO: 37551 - protein, 29 aa, Homo sapiens
MSERRVGRAAAAAAAAAWSAVAGPGRLSS

SEQ ID NO: 37552 - protein, 205 aa, Homo sapiens [sequence omitted]

SEQ ID NO: 37553 - protein, 52 aa, Homo sapiens
MYCFTEEMEYKKPSNLWNSLLCFSFFFLAVESCSLNRARLVWNSWAHVVLPP

SEQ ID NO: 37554 - protein, 83 aa, Homo sapiens
MGLGGRFLSRCSRRRVDRLAWPQPGRHVAPVLPGWERQPSWELPGSCRQQDSGLGSQGPPGPGAGNHICPQPQPPAPVILAAP

SEQ ID NO: 37555 - protein, 69 aa, Homo sapiens
MKPRTLATMLKTASGPSALINNPGHGLTDSFHPESEDHGGAILNSAQRRLPGILMSRSHCSQCDKHSSN

SEQ ID NO: 37556 - protein, 67 aa, Homo sapiens [sequence omitted]

SEQ ID NO: 37557 - protein, 63 aa, Homo sapiens [sequence omitted]

SEQ ID NO: 37558 - protein, 30 aa, Homo sapiens
MKSIQASLISTLRARSAELIRRAVVPRARG

SEQ ID NO: 37559 - protein, 19 aa, Homo sapiens
MNWILIVTLLFSPCVTLEP

SEQ ID NO: 37560 - protein, 29 aa, Homo sapiens
MTSHWPAQTCLCLSFLSSVSTGSFTRLHI

SEQ ID NO: 37561 - protein, 78 aa, Homo sapiens
MWASICIMGPAGPAQAASGASPPPASRPPPAASLSLATATTAPARLAVLPQTLISAAGPAAAQRLPSAWRTTAPLAPP

SEQ ID NO: 37562 - protein, 49 aa, Homo sapiens
MCVALILNFGGILLCEADRHCKGPRVACLSLEMELNQIKSFHWRLVLTL

SEQ ID NO: 37563 - protein, 34 aa, Homo sapiens
IGSLLLIFLFYSVMFKLRNALCGSSESHLWFSRH

SEQ ID NO: 37564 - protein, 31 aa, Homo sapiens
LGFIMLSRLVLNSWAQAISPPLPPKALRLQA

SEQ ID NO: 37565 - protein, 64 aa, Homo sapiens
MTSWASRGTLEAVSAGRMRRRRRRRKQARRPRRRRARQARLTTGATSGRRPQEPAAGGDSTAEL

SEQ ID NO: 37566 - protein, 18 aa, Homo sapiens
IFHSLFLLNFFILNFQIL

SEQ ID NO: 37567 - protein, 28 aa, Homo sapiens
LEMSTIILMTKGATYFSTLTLIISASIC

SEQ ID NO: 37568 - protein, 10 aa, Homo sapiens
LFVLVLDLCL

SEQ ID NO: 37569 - protein, 42 aa, Homo sapiens
IVFIKKYIVFFFSRRGGKLSHYRGPAMLCIWACCMSCCRCLH

SEQ ID NO: 37570 - protein, 38 aa, Homo sapiens
IHSILLLKTWGEIISLSRPCYAVYLGVLYVLLPMPSLK

SEQ ID NO: 37571 - protein, 13 aa, Homo sapiens
ITHLILCVFIIKL

SEQ ID NO: 37572 - protein, 35 aa, Homo sapiens
LWKTDPLDKRHVWGKRGFLMLFWMFPKSTAAALPP

SEQ ID NO: 37573 - protein, 42 aa, Homo sapiens
MFSFSTSHVMLLLQDTALLVLPCTILPMTRGLASYCILRTSS

SEQ ID NO: 37574 - protein, 63 aa, Homo sapiens
MKPRLGSIFFYRRICSLVLFIATQVQRVNLTSFIFQGMLLLLVCERILFCSLIMLNYVKLPLL

SEQ ID NO: 37575 - protein, 29 aa, Homo sapiens
MFGQLAVSLLSCCQECLCGQENRMWISCI

SEQ ID NO: 37576 - protein, 52 aa, Homo sapiens
MRESVSVFPVWIAMRTSTQSDCRPSSQHLRVFETFEVVVCRLGWELFQFSLG

SEQ ID NO: 37577 - protein, 41 aa, Homo sapiens
MATFNTIPMWCIIQKENSWHVTISTTCTLSLSLMSLKSRSW

SEQ ID NO: 37578 - protein, 36 aa, Homo sapiens
MASPGELKMSFHICKSGCVGTVLNLWIQGSMNTESA

SEQ ID NO: 37579 - protein, 86 aa, Homo sapiens
IQLKHYILALAALHCSSVLLVEIWILRREHSTALSSQENSRCKKLQCINCREESTVLQAERATTALLFNEREKMKERENFRRLGPI

SEQ ID NO: 37580 - protein, 58 aa, Homo sapiens
LQNCELHLFINDPSQVFCYNTTKWTKTSIYPKEIKMLRHKEELLTPDDQLLSSYGPSR

SEQ ID NO: 37581 - protein, 51 aa, Homo sapiens
LHLHFPRLIRVATLATVVTDVWMFLNISEGVVEKNTHSANHLYELNVSEVY

SEQ ID NO: 37582 - protein, 62 aa, Homo sapiens
LLRCRILCYATALQLTFSCLASVRPEAPRPPCTSLSSGTELCQAPEPPGRARAAVGVEGAFT

SEQ ID NO: 37583 - protein, 44 aa, Homo sapiens
LSLEVIMIHSSSVILIVLNCVSLRIVTDEPYVSLYQCRHDFRYL

SEQ ID NO: 37584 - protein, 82 aa, Homo sapiens
LWSQPAEGLPPQLPQGGLPPEAQAPGVFLPVAGFSPPWACLFCLCLLDTVSSPLLQRALPRLRLRSPPGSFCWLRTRPTTAV

SEQ ID NO: 37585 - protein, 33 aa, Homo sapiens
LGTAKGVGVMGFFLHWSLTSVSFDTQAMLENAG

SEQ ID NO: 37586 - protein, 50 aa, Homo sapiens
VVSGPLVAMTNLCVCLIFASSSVAGPAPRTPLPLCEELWEVWVCLQNRRE

SEQ ID NO: 37587 - protein, 64 aa, Homo sapiens
VQFLFTLGCWFKLLGARTVSSLGSGQRILQGFSSSVFWRTRALLRGSRDCQAVSARKAKIKSEM

SEQ ID NO: 37588 - protein, 64 aa, Homo sapiens
LLSHLLRSRWWGTAAWVLAWPVMLLASRPQTHSKHSCSISHAEELGWSLLGVRPRDWLVCSTKV

SEQ ID NO: 37589 - protein, 39 aa, Homo sapiens
MPQLTTSSLLVPSLQCPGCHLLPLWVPGILPHRLPKAPF

SEQ ID NO: 37590 - protein, 30 aa, Homo sapiens
LEDLRAGLSTCWLTPVTVPLFSSCFLCGHS

SEQ ID NO: 37591 - protein, 47 aa, Homo sapiens
MPESTPSGRQKSLTSAAMCLALCAKGQVRREQDRTSAALWNSAGRSW

SEQ ID NO: 37592 - protein, 93 aa, Homo sapiens
MCPGVMGVGSTQSIVLVPGFPKPSTMNVQWKAEGAASQKDASTHKDWSSQVSSITCKPEKPETLPLGHFINGDFIVIIPAGGRALLSATGNAL

SEQ ID NO: 37593 - protein, 150 aa, Homo sapiens
VLLLLSSIVGFFLMQSVTRPGIPMCAQLAHSIIVPRKLLQFIKSSGLGISLNSKRRKEETFPTRCGCDASQGPQGHCPRAHRPPLTATGAWIRSYIVQSFRPLPWSTRTRARISGRAHTHSYTRTQTRGRRQVGNFVRRSQRRSASSCSS

SEQ ID NO: 37594 - protein, 44 aa, Homo sapiens
MAPGGPSMPWVRSACPVCAMSVPGPFLPWAGPQEEPVGVERGLR

SEQ ID NO: 37595 - protein, 57 aa, Homo sapiens
LSTSSPTLIIFLFLFLKKISYGHLSGCEVVSHCVFYLHFLCNELETKVQTRWDIQSL

SEQ ID NO: 37596 - protein, 154 aa, Homo sapiens
LEARVREEAAAEGWGLLRRRGSLARACWGRAREPRPGGSPGLSPAASGMFPARCQSAHRALLRGRAVQPSPAALRRPRPDGRALAPQLWVPWSRRAPAAGPPSASSAPGWRAWTVRAASSPCPGPCRGGGPRERRPAARGTSRPGSESRSSLAG

SEQ ID NO: 37597 - protein, 44 aa, Homo sapiens
MVYFRCALGLWCSSLLPVTFFFLFCNIDDINVTFEIFLNYCCNG

SEQ ID NO: 37598 - protein, 322 aa, Homo sapiens [sequence omitted]

SEQ ID NO: 37599 - protein, 62 aa, Homo sapiens
MRLRCFSTLHPLQHCLESQAWSQSYGLTLKRPLFIRREKGGRDEKGRQRKKLYDHGFSKIHG

SEQ ID NO: 37600 - protein, 24 aa, Homo sapiens
VSTINSDLEGMDLLTVGAILGFFG

SEQ ID NO: 37601 - protein, 73 aa, Homo sapiens
VTAPGSATLPAAATAAAAAAAAAAAALGSPRVSGTALSTVSGAASPTLHPPRPPHPLPHPCALMWSLREQNRP

SEQ ID NO: 37602 - protein, 61 aa, Homo sapiens
MNTPNIVSLRAHQPEVGIIPSVLLMRPLRIKGVFHHIHSPLHGENQGFTLCLQGAPPSSSV

SEQ ID NO: 37603 - protein, 32 aa, Homo sapiens
LRDLKLFFFVFLWVQFEREVFDPFFSEWIICS

SEQ ID NO: 37604 - protein, 82 aa, Homo sapiens
LELMSRPAAAAAAAAAALSFVSRAVWARAGVPGTPPPPSFPQDSSLLALGPNGARLPGGRSAHRARLPLLLPDHLVSTRNEI

SEQ ID NO: 37605 - protein, 81 aa, Homo sapiens
MSRPAAAAAAAAAALSFVSRAVWARAGVPGTPPPPSFPQDSSLLALGPNGARLPGGRSAHRARLPLLLPDHLVSTRVCLHY

SEQ ID NO: 37606 - protein, 28 aa, Homo sapiens
MVLPSLFWHRRKDSTSLGEKKKENLGLH

SEQ ID NO: 37607 - protein, 83 aa, Homo sapiens
LEGSHEGDLCLISLGNPFCYFLVLLATLSKNPSIASLRFKKKKKKKEKKVMEAVSASLSSTCNLSNIPSPSHRFLFDTFTSQH

SEQ ID NO: 37608 - protein, 97 aa, Homo sapiens
LMLLSPLLVRLNWPLVATPRPDLAATAPSDSSGSRGHGGASAASRSGAGKGAGEAEAEALESLPRRPAPAQKSARAVHTVGTSTPGTARLRAGAERG

SEQ ID NO: 37609 - protein, 33 aa, Homo sapiens
MNHSHSPVPNVFVSFQLICSKCLLSSLWIVLDF

SEQ ID NO: 37610 - protein, 67 aa, Homo sapiens [sequence omitted]

SEQ ID NO: 37611 - protein, 133 aa, Homo sapiens
MQSGGGVKTDDTSTLNSLCGYAWVYVWEEKQRCRLSSFFSSSASIPGLLPSHTLDLVQNVGVVLDEALGWGRERELCVKCLLEMHCGVFSCMGNHLCQAFPHFPYLSHLVSCLCFQLCVILFASCTKLIFSKV

SEQ ID NO: 37612 - protein, 45 aa, Homo sapiens
LLLLMLLLMAKKKKRLRVCSPLLEETPSPFQRASGLVCTPSKKAS

SEQ ID NO: 37613 - protein, 29 aa, Homo sapiens
VCVCVCVCVCVCVCVRPAMTTRRNKWDGE

SEQ ID NO: 37614 - protein, 50 aa, Homo sapiens
LYHLDVILNIYILARLLKRTHFISKCKLFARLLANGSFNCELIVYISVYL

SEQ ID NO: 37615 - protein, 58 aa, Homo sapiens
MVCISVAMTTQQQLAWASYQSTNVLLTRCLSDFARQFSLLDSHKRFRRLLTAFRGETG

SEQ ID NO: 37616 - protein, 15 aa, Homo sapiens
LFSRELRPLVLVIFV

SEQ ID NO: 37617 - protein, 28 aa, Homo sapiens
LVKPLPTLTFIIVAPSLPSSVPQISNKR

SEQ ID NO: 37618 - protein, 58 aa, Homo sapiens
VEILGLFGHPENRSQIPSPQLQTSRLIGGEHSFSLLFGMLCCLVVTVPMGELYRKIVM

SEQ ID NO: 37619 - protein, 17 aa, Homo sapiens
MFSLFIGLLSLLSHPPH

SEQ ID NO: 37620 - protein, 203 aa, Homo sapiens [sequence omitted]

SEQ ID NO: 37621 - protein, 47 aa, Homo sapiens
LHMKRKSCVCVFILAGSSTRREGSGFRAGLKTSHQSGDNSVEANSFS

SEQ ID NO: 37622 - protein, 21 aa, Homo sapiens
MSLFPYRSRGQKSAISFGGPK

SEQ ID NO: 37623 - protein, 82 aa, Homo sapiens
LGSTGSELLRGGSCGRGKGACARRQSGLFPRQLVSPSPSPPSPRLLRSSFPCLGSYTQALFRAKVSVITSVFCLASILPLNL

SEQ ID NO: 37624 - protein, 41 aa, Homo sapiens
MCAATIGPLPQAACEPLSLSALAQAAPIFVSLPRLIHPGFI

SEQ ID NO: 37625 - protein, 52 aa, Homo sapiens
VMQACQGPQTQKMLPGSPMYSRHTAGHLSQQVASHGPHHHDFCPRYCVQKCD

SEQ ID NO: 37626 - protein, 15 aa, Homo sapiens
LVLKTVAAWRAWISK

SEQ ID NO: 37627 - protein, 56 aa, Homo sapiens
LVLPSHTSLPGVSLRQPGLHPGSPHPCHISLFSLTPTFLFALLSLSHILETVFNTH

SEQ ID NO: 37628 - protein, 147 aa, Homo sapiens
VGVSSPLSLLPSLARTLAVSSLCRDCQSVRLQRGGDGRLCHGFMRAGTGRRTCRRRGEETWSRPLALWGRVGQSVGEAGGGDRTGWGWTPGFWERAGSPDARVPKVSGVAISPDPPRGRSAGQRGGGWGEAWPERCWKRSRDLWGPR

SEQ ID NO: 37629 - protein, 72 aa, Homo sapiens [sequence omitted]

SEQ ID NO: 37630 - protein, 162 aa, Homo sapiens
MPRYVPLLLLLLLLRCSERGGGVNFGEKDAKVPGTWRDGVRVPGEGASWDSDRASPERRYGIVGLSQSISTKHPETSPKDSRIRENDVTADGRTTEDHITADPGTTEDSVTADPGTTEDNVTVDPGTTEGSVTADPATTKDYVSADPGTTKDSVTADPGTTH

SEQ ID NO: 37631 - protein, 251 aa, Homo sapiens
MPRYVPLLLLLLLLRCSERGGGVNFGEKDAKVPGTWRDGVRVPGEGASWDSDRASPERRYGIVGLSQSISTKHPETSPKDSRIRENDVTADGRTTEDHITADPGTTEDSVTADPGTTEDNVTVDPGTTEGSVTADPATTKDYVSADPGTTKDSVTADPGTTENFVTADPGTTKDSITADPRTTEDSVTADPGTTKHSITVDPGTTEDSVTADPGTTKHSITADPGTTEDSVTADPGTTEDETTKHGDTHLL

SEQ ID NO: 37632 - protein, 52 aa, Homo sapiens
MQSTWLLICQAHSDPAAGREGANPGLKTQGDQNQGDETYQGWAAVGVLPERS

SEQ ID NO: 37633 - protein, 136 aa, Homo sapiens
LVSLFLLFLFLFLFLFLRQSLTLSPRLQFTGVISAHCNLCLPGSSTSRTSDSRIAGITDRHHHTQLIFVFFVETGFRQVDQPSFKLLTSGDLPALASQSAGITRMSHRAWPILLYCNIFYYISHHACPIFLCFNIF

SEQ ID NO: 37634 - protein, 38 aa, Homo sapiens
MSEVATLLFSQTALASLESVHPAGHKLWMRNLRQVTSP

SEQ ID NO: 37635 - protein, 60 aa, Homo sapiens
LLFLFWSFKTLHFLVFLFVSSQFPVFAMLKFFGEVLNLLFFRFLHAEMNLYCHLTTISSF

SEQ ID NO: 37636 - protein, 18 aa, Homo sapiens
MSFLLQLFAASLLCKVVT

SEQ ID NO: 37637 - protein, 31 aa, Homo sapiens
LPPSVRVCLFFFFFFFFAWRKHYKGWECMFL

SEQ ID NO: 37638 - protein, 221 aa, Homo sapiens
LRYVAQAGMELLCLSNPHASASQSAEVTAMSHRTQPTFLLITEKQVDLHRCNEYEGSAIRYFLFFIYLFFNLIFFFLRWSLALAPRLECSGAISAHCNLCLPGSSDSSASASRIAGITGAHHHTRLIFVFLVETEFHHVGQAGLKLLASGDPPASASQSVVITSMSHGAGGLIFLIFSRDKVSLYCLGWSQTAELKQSAGHVLSKCWDYRLEPLHPACKIF

SEQ ID NO: 37639 - protein, 27 aa, Homo sapiens
MNICRVSMVLSMHIFVSVFLMYPCEPG

SEQ ID NO: 37640 - protein, 31 aa, Homo sapiens
LWAWPSLISALALLYRSRRRYSWRRGKERWK

SEQ ID NO: 37641 - protein, 63 aa, Homo sapiens
MMAQKSKFRVLFMSDPHGTAMPLTSAILESSRASLAAKQEDKCFTDIRNLKWKHFLEHTKQPP

SEQ ID NO: 37642 - protein, 91 aa, Homo sapiens
MNVVESCRGIGKWHDDDTGAPSDPLISCLPCCRCIAIYRSRRMDLLNDLALFSGPIYHIPFLLQIFLLSPFLWDLSCYIPSELTNAFTFFP

SEQ ID NO: 37643 - protein, 61 aa, Homo sapiens
LIPAPHLKYFLVLFITLIFPPALVCTLCSFGGPKYLACSRHSELCIECDEFNRYQLIPTEY

SEQ ID NO: 37644 - protein, 32 aa, Homo sapiens
MPLQRSYRFLFIITLTMLYIFICFGNSLSIRQ

SEQ ID NO: 37645 - protein, 23 aa, Homo sapiens
VRALTAILWKPPSSLAQASVVAP

SEQ ID NO: 37646 - protein, 20 aa, Homo sapiens
LFLLLLLPFSLHTVLIGGSC

SEQ ID NO: 37647 - protein, 39 aa, Homo sapiens
MAARSSSGVAAAEGAAALAAAETAAVTVAAAARDLGLGE

SEQ ID NO: 37648 - protein, 11 aa, Homo sapiens
LCVLIIICVLI

SEQ ID NO: 37649 - protein, 59 aa, Homo sapiens
LLLLFALYPMRLGDRSPGFEPCLPPLPNVGTQARPFYLLGLSFHVCTTRGLTRWPQVFL

SEQ ID NO: 37650 - protein, 23 aa, Homo sapiens
LARVEDQGTEQKSPWWPECQVSS

SEQ ID NO: 37651 - protein, 46 aa, Homo sapiens
VPGCWGEGGCTAAPPPRVVLADACPAVTSVGLVATATIFLGFGPVL

SEQ ID NO: 37652 - protein, 35 aa, Homo sapiens
LEAGAITAAVWAQAMCSSGALGTAVARAWGQPVQS

SEQ ID NO: 37653 - protein, 14 aa, Homo sapiens
LFSLCFVSVHLLIR

SEQ ID NO: 37654 - protein, 82 aa, Homo sapiens
VVGSGWKLRYGKSFLCSLAPSPPPWFSSAAVGGEHPETRAAVAAASPRLGGRAAGQVLSAPRASLAASLLCPAAAVHMGCWR

SEQ ID NO: 37655 - protein, 63 aa, Homo sapiens
LGSGGGWLAVAGSFAMGSRSFALSRPVLLPGSPQPLSEESTRRRGLQSRRLLPAWAAAPLGRC

SEQ ID NO: 37656 - protein, 54 aa, Homo sapiens
MLPGLRAVAPGAEGGAGAAEAGKPRTGLLAGHSALHGRSVNGDYSSIYRELAVG

SEQ ID NO: 37657 - protein, 54 aa, Homo sapiens
LSASREPHVLLVLTSPRAPSSRGVWGSCCLPGSALLIPQPVSAPVVSRCDFFFF

SEQ ID NO: 37658 - protein, 40 aa, Homo sapiens
LVTFPCHWSSLNTVKPSSSVGCFFFFFFFLGVSQALKATV

SEQ ID NO: 37659 - protein, 69 aa, Homo sapiens
MVLTRVGPSSCSWTTSSSVRQAGEEAEPGERVEDQLDYVFGSGISKQSTNKFFLMLSVSGAVIRIVFWV

SEQ ID NO: 37660 - protein, 71 aa, Homo sapiens
LPAPAGRGWAAGGGRAAPSFARATKTKAASGAGWMQTTMKDWVLALPGSAAAAAAAAAAAPPPAAAARAPL

SEQ ID NO: 37661 - protein, 59 aa, Homo sapiens
IFPSEAFSPQCLCMFLAAFPLEYISTVAFEAGLLECTPELRIHSNFLDDSQWRKPDAMS

SEQ ID NO: 37662 - protein, 39 aa, Homo sapiens
LCPHQMLNLLSTLIFHFTFIRTTAVIAPAILCRNDLKTD

SEQ ID NO: 37663 - protein, 46 aa, Homo sapiens
KPTVLGFLACGISLVGLHTKPCRSAAFPDSPVLSECKGLPCRRCVL

SEQ ID NO: 37664 - protein, 34 aa, Homo sapiens
KRASEQASAGGKRQRMSAIYPPLLGALSFIAASS

SEQ ID NO: 37665 - protein, 50 aa, Homo sapiens
ITYRASPCGLGAPSGAILMALGALLPFSIIMWTTGATAQSKTLQFLSGLN

SEQ ID NO: 37666 - protein, 78 aa, Homo sapiens
ILLWLLVLPALMVGITYACMPLTPAGPTPIMILCPKLIYTSGSSSLLKTNAQMLFTDIYILVSLSCPTLLLFPIPNSS

SEQ ID NO: 37667 - protein, 32 aa, Homo sapiens
LAQCPSPLLAFCCSSTFLCIEGLTLGWEDDKT

SEQ ID NO: 37668 - protein, 63 aa, Homo sapiens
MCSSGVPSPPASHCPCLPKTSSLSLLCPPPPPSAFALLSSFSPEVRAASSPLVLFLPSLCSLL

SEQ ID NO: 37669 - protein, 71 aa, Homo sapiens
LTSRTQKLITTCLSRWLQKEMKKVFLLLLLTCQDCGRRMTSRGQNACCSRRRGWAAGSLSQPQMLSEGTPS

SEQ ID NO: 37670 - protein, 37 aa, Homo sapiens
LPEFSLWSTSFLRLSSVFLFLSPLPPTFFFPSQFLAL

SEQ ID NO: 37671 - protein, 35 aa, Homo sapiens
KSLISSLFLLQDPEALSLSPWSSAGPWPCWGAPWA

SEQ ID NO: 37672 - protein, 63 aa, Homo sapiens
MALRCGTHWLPTKAPIRRLPHCKTTWLSLCTAMSPLTTEIWALRRGNSSASWSRAASGGRRSP

SEQ ID NO: 37673 - protein, 14 aa, Homo sapiens
LFLFGHLGTGLSLF

SEQ ID NO: 37674 - protein, 84 aa, Homo sapiens
LNARPALDLTDTRLDRLLHIRPRNGPLEKGFFKPAALSSVLASGIAFPGNLASDIAHHPALFTVPGSSWRNDISENADSYVHVI

SEQ ID NO: 37675 - protein, 66 aa, Homo sapiens
LAGLGARSRLSAFAAAEWPVRGSPRRGSVVPRRRLPPSALISGAGTAFHSAPVVRSLRLPFRIFRL

SEQ ID NO: 37676 - protein, 13 aa, Homo sapiens
KRGKPEKDSVPDG

SEQ ID NO: 37677 - protein, 103 aa, Homo sapiens
MRRKRHPWKMTRIMSRHPPMTRKLCRTPSCLPSLSPTPTPCTSTGPPLGKPPSSLLCPPRDRWPPSRPHQPAGITRHCPHPRPTTKNPAEAETTKRQSSLLLQ

SEQ ID NO: 37678 - protein, 29 aa, Homo sapiens
KVKTLKDRHFWQSSVFCAWTLWAHPGHGG

SEQ ID NO: 37679 - protein, 40 aa, Homo sapiens
VVQPVKTMVPPLLCLSPLSPSRASVQIDHHQNLCGFLTFE

SEQ ID NO: 37680 - protein, 30 aa, Homo sapiens
ISCFLLLSFLILSKFSDSRKRNHSPLPPTT

SEQ ID NO: 37681 - protein, 53 aa, Homo sapiens
VQRGAAAGRPSRAHFATLTVPAVAVEVGTAAASSPLVTAQARTPAEPLGCALP

SEQ ID NO: 37682 - protein, 35 aa, Homo sapiens
IEVEVGEYVVAVRAAFCKMLPGGACDSRPSSLQRK

SEQ ID NO: 37683 - protein, 48 aa, Homo sapiens [sequence omitted]

SEQ ID NO: 37684 - protein, 37 aa, Homo sapiens
RPHRETLQSRIPAEFLYLVLLLIKGAPVSSFSPSPGT

SEQ ID NO: 37685 - protein, 28 aa, Homo sapiens
LSFSLSLSLCPFLLDRSTVIHRNKHTRT

SEQ ID NO: 37686 - protein, 32 aa, Homo sapiens
IVCSCLGFMPLNFTFYYTAIAGLFMRLTWPLH

SEQ ID NO: 37687 - protein, 55 aa, Homo sapiens
KNIFLKKPASPRKATAVFFFFASFSYFRSRGFSCFSSLFFLFANKTKNSIEERAK

SEQ ID NO: 37688 - protein, 69 aa, Homo sapiens
MMKLQLPLQLSSVWILRATTYTGRIKVRRWSFWISPASGILALGSLPRCPRARSSGTSSTWTFLITVSC

SEQ ID NO: 37689 - protein, 7 aa, Homo sapiens
MQFQGRQ

SEQ ID NO: 37690 - protein, 7 aa, Homo sapiens
ISFFFFF

SEQ ID NO: 37691 - protein, 52 aa, Homo sapiens
RGLKMGHFLSSPSCSVSALGPAISCCPWASASCCWSSSVWLDSKIPNFRGTW

SEQ ID NO: 37692 - protein, 50 aa, Homo sapiens
TPATPAALRTVLAVAAAAPVSRWARTQPLGAVAFPASQRQKRGSGTQKVA

SEQ ID NO: 37693 - protein, 42 aa, Homo sapiens
MRPPSAPPRRGCIPWQGLLLTGSWAKGTCLVSEETWDFGLYW

SEQ ID NO: 37694 - protein, 137 aa, Homo sapiens
MNRRLGSRPSPPLPRPSPFAPPAPSSPLSFLLGLCWGLEGSGLRSEPACGGGARPSRHPQRPAILGSAAAAGVWARSLRAPRRPLAPDSFFFFFGGIFFFPRGGLAASNKLGEREGENAKSRFLSTSAPPTPVLSKK

SEQ ID NO: 37695 - protein, 34 aa, Homo sapiens
MSLSSVTRFTMMLRVLIMTMMPSWVLKKQRPLIS

SEQ ID NO: 37696 - protein, 12 aa, Homo sapiens
MQSFYLVFTFVT

SEQ ID NO: 37697 - protein, 17 aa, Homo sapiens
IENMSFLLIKVFIIKFK

SEQ ID NO: 37698 - protein, 22 aa, Homo sapiens
RQRMSAIYPPLLGALSFIAASS

SEQ ID NO: 37699 - protein, 89 aa, Homo sapiens
MARPPACSCAWTPRSRFGCSSACTGPSRRSASSAPLSWPSGVSHHSPAPLPPRQPRPVPWAAACLTPCSARAALALWVALLVGQPPIRQ

SEQ ID NO: 37700 - protein, 45 aa, Homo sapiens
MRPPGLLSVSPTSCAQFSGAAGLTSQVFPEPVPSSWAALPPRAPT

SEQ ID NO: 37701 - protein, 15 aa, Homo sapiens
MKNQRNITPGAQLFP

SEQ ID NO: 37702 - protein, 39 aa, Homo sapiens
IAFCHLSLYFRRYLLSVYCVPGTISMCIEKPWKAIQQYI

SEQ ID NO: 37703 - protein, 51 aa, Homo sapiens
VPVFAHLSILQSLVPAAGAASPVAISAQHLCYSHVTPGDPGAGAGQGPAPS

SEQ ID NO: 37704 - protein, 12 aa, Homo sapiens
MAPRGFDACVPF

SEQ ID NO: 37705 - protein, 82 aa, Homo sapiens
LVLHPSRHSAVSCLGVAAAMARKALPPTHLGQSWFCSCCRDTELAISALRARTATGSPGSCRCTAGPLPCASALESCCCRVT

SEQ ID NO: 37706 - protein, 52 aa, Homo sapiens
MLDRFVLSLSSSIAGSQELFGKFVAMHESGDWFFFHWKLLMGTALAAPYRFA

SEQ ID NO: 37707 - protein, 27 aa, Homo sapiens
MSSSLWTTTAVSTWTASLLRSRPSTRI

SEQ ID NO: 37708 - protein, 153 aa, Homo sapiens
ISVALFSPSWYSPPNLGFLHARVASCSTSLSLILVSTSSPGKFPFSRLALPTRASDFHPSFSLLASDYPPPIPPRPAAQLPPPFTRTGTIIPTPLRPVWDSTCLLPNPTLISAWSLPLWPNLSSRLIGDGHSHSLVPNTSSWMDSRHPCPLFN

SEQ ID NO: 37709 - protein, 34 aa, Homo sapiens
RASATCMMWIGEMVCPPSHGMSLLCSGIFPSLGF

SEQ ID NO: 37710 - protein, 31 aa, Homo sapiens
KNKAAAWSLFTMFIAKSFRNKQFPCTVSCSL

SEQ ID NO: 37711 - protein, 48 aa, Homo sapiens
KKNYIFLIFFFKSLPLVALYLRLHFLQETLFPTSACQVSTSRSVWFSC

SEQ ID NO: 37712 - protein, 11 aa, Homo sapiens
KATICLLPVLL

SEQ ID NO: 37713 - protein, 32 aa, Homo sapiens
ILKTMNVLWAFTYWVQMLEKLHKALQLRSNVD

SEQ ID NO: 37714 - protein, 54 aa, Homo sapiens
REKGIIYNMILSHLLHLCAHTCEGLGPASTTALPQTQLSTSRQDGITVTGGPEV

SEQ ID NO: 37715 - protein, 76 aa, Homo sapiens
MRTPGPPRRGSRRSLLPRPAPCPPTRSPWPLAASGSPALTTTSTSASWARRAAARSTCWTSPSTTTSSVARWIHTT

SEQ ID NO: 37716 - protein, 34 aa, Homo sapiens
MLYLSFLEMSTIILMTKGATYFSTLTLIISASIC

SEQ ID NO: 37717 - protein, 30 aa, Homo sapiens
MLSHGKGRHRVAVVSGHLFSEGSAWSTIST

SEQ ID NO: 37718 - protein, 9 aa, Homo sapiens
ISLFSALLA

SEQ ID NO: 37719 - protein, 19 aa, Homo sapiens
IGLVLLVFIHCGSFSLPPP

SEQ ID NO: 37720 - protein, 14 aa, Homo sapiens
LPISLVIYFYICFL

SEQ ID NO: 37721 - protein, 20 aa, Homo sapiens
RHHFLQLRPNILMSLQLLIL

SEQ ID NO: 37722 - protein, 37 aa, Homo sapiens
MGTQMIHEFALVSLAQVVCANHVCLHSSVLPCVLNKK

SEQ ID NO: 37723 - protein, 67 aa, Homo sapiens
LGKFMTLVITIPLSTSMSLTKIPHGTYRGKDMWGHNERTAICKPRRESSPETNLTGILILNFLLPEL

SEQ ID NO: 37724 - protein, 15 aa, Homo sapiens
MKIKSLFICFSFSLV

SEQ ID NO: 37725 - protein, 44 aa, Homo sapiens
LSFAAIADLLLTSIPLDPARAWILTMSRFTVYPCLFGYTSDVHF

SEQ ID NO: 37726 - protein, 19 aa, Homo sapiens
LGRTQPMCSAWTLLILCLA

SEQ ID NO: 37727 - protein, 15 aa, Homo sapiens
LVIFFTITRIVLGIL

SEQ ID NO: 37728 - protein, 43 aa, Homo sapiens
LGMFRLSLFFPLLQTMGTLGSLGVTMLHLLFICLGKSCSSHTL

SEQ ID NO: 37729 - protein, 4 aa, Homo sapiens
MLAS

SEQ ID NO: 37730 - protein, 51 aa, Homo sapiens
VGSQREPTVQAMTSWHPALLHICPTGVAVAPSCKAMLKKLWKQEGSMDSKN

SEQ ID NO: 37731 - protein, 12 aa, Homo sapiens
MLGLCVCVCLAV

SEQ ID NO: 37732 - protein, 12 aa, Homo sapiens
MKNGESSCRMPM

SEQ ID NO: 37733 - protein, 27 aa, Homo sapiens
IYTLFILHTYFFPNNLQLRSEDTTNSA

SEQ ID NO: 37734 - protein, 32 aa, Homo sapiens
MMEQLKGDCSFWLICLFFSFSSVLFALMRIET

SEQ ID NO: 37735 - protein, 32 aa, Homo sapiens
KQSKPGHTILPQAQLLSCLPTPWGAISAPNSA

SEQ ID NO: 37736 - protein, 18 aa, Homo sapiens
LSCWLIRFMCMKSMLIGL

SEQ ID NO: 37737 - protein, 71 aa, Homo sapiens
VDVAFAPTGASESSSPQDELQPPRESSARHQVTRPQPPGPQLRPASPRSGSCTLTLDSAAHGKNRIAPACN

SEQ ID NO: 37738 - protein, 33 aa, Homo sapiens
MAMFLLGLVPAGSGSCSWGHSVNRVHGQQPNIQ

SEQ ID NO: 37739 - protein, 20 aa, Homo sapiens
MKAGLPGACLNAGGRRAAGR

SEQ ID NO: 37740 - protein, 32 aa, Homo sapiens
LAGLQVRGWPVSVPGSCGRQRQATWVQIKTKL

SEQ ID NO: 37741 - protein, 17 aa, Homo sapiens
VPPVSWANRCLSLLKFL

SEQ ID NO: 37742 - protein, 43 aa, Homo sapiens
LAKSGRSHIYAYGIPIMSRLCLFLKMSIHMELPAWLLTQMDSV

SEQ ID NO: 37743 - protein, 108 aa, Homo sapiens
LGLIHWEQFRWSGSSRSWTTLTGFLSWVPAPFPFLLLQMPFLCPSSPGTDISSAGCCSWCPSSKPLLGISARFTLGCFLRRESAPLLHDGIFLPCRNGLSLISTYFHV

SEQ ID NO: 37744 - protein, 29 aa, Homo sapiens
MRALFLIISLLGKNRMNQPCPMLGSWRQE

SEQ ID NO: 37745 - protein, 81 aa, Homo sapiens
LALLTSPNDPCCRKMSRGTIPAMKRECQYNSHKGSSCGPQTKNHCITSAGCIGEKGAGTEKPEINHLSFLEKRMLRLSRFG

SEQ ID NO: 37746 - protein, 81 aa, Homo sapiens
LALLTSPNDPCCRKMSRGTIPAMKRECQYNSHKGSSCGPQTKNHCITSADCIGEKGAGTEKPEINHLSFLEKRMLRLSRFG

SEQ ID NO: 37747 - protein, 26 aa, Homo sapiens
MWCARFPCIVLLTAAPLPLSMTPKQI

SEQ ID NO: 37748 - protein, 118 aa, Homo sapiens
VVLKGQMLVVVSLTHSFISATVLSTTCTRGRGVNKIPFCLGGRPLPMGLAISRKAPQSSTLFWLCVKDVCEQAQSFAARMRGQSIPLHTHPGADRLVPPSLHACPSTGSFAAPAPPAP

SEQ ID NO: 37749 - protein, 10 aa, Homo sapiens
LDAWSMEGAK

SEQ ID NO: 37750 - protein, 47 aa, Homo sapiens
MDWTYSCYIWILSNLFITVLTDSYVLAFRISPLDQLLACLTFSASFF

SEQ ID NO: 37751 - protein, 31 aa, Homo sapiens
VLSYLAFAIYFNFIVKFLYCIVSLVYLKTYF

SEQ ID NO: 37752 - protein, 64 aa, Homo sapiens
LESRVFPGDQAPLQATLFSRGVKEQKALGAALGAGFRTLPFLALCTSLSPFGAGGAGSGVTKEL

SEQ ID NO: 37753 - protein, 77 aa, Homo sapiens
LQDLVWSGRRRDMSSLWALILVGIFIHQVHKCNFKPSATFSKLFLHLLQSYSDGKNFLCFSSLIYYFFKLQEQCILL

SEQ ID NO: 37754 - protein, 24 aa, Homo sapiens
MQEMVLLVAATGLRSPLVRDGSDL

SEQ ID NO: 37755 - protein, 47 aa, Homo sapiens [sequence omitted]

SEQ ID NO: 37756 - protein, 206 aa, Homo sapiens
MRFVGSTVPLSAAGCADGPGSPASRPLPLPSLPFSLFLSCLSAHPPQPHRRGVASLVALLSCPLCVPLSSLGLQKGRGGGWGASGEEGKSVGYELAGDARLRARRELRANPGPRSVPPRCLGVARAGVASPSAQRRRGGACAVQDPRGPRGSQGAAGPVSLCLQSLGPVRSAPRAPGEDNRCLLPHPGSSGGSPHARWRHCAYRQR

SEQ ID NO: 37757 - protein, 57 aa, Homo sapiens
MLRSNTLAICMLHAICWQFLSDIKMKQYSWTEDTEFLIPVGLVLFSVSYNCTWRNRY

SEQ ID NO: 37758 - protein, 31 aa, Homo sapiens
LLGPTGLVLLTQPARLCSAHTTCLDPMSAKG

SEQ ID NO: 37759 - protein, 41 aa, Homo sapiens
LIPSKREQSGTHKYGMKTFGEEAFTERRFLGWRKTMIYSSC

SEQ ID NO: 37760 - protein, 46 aa, Homo sapiens
LHVSFCLALLALPKGNFALPGCFFSAVVEYMEVGDAEFSGSSVADF

SEQ ID NO: 37761 - protein, 63 aa, Homo sapiens
VALMPLFRVLFSCTCALLQDFRMQPCPPTPTSQGRPVLLGRQTSQEYILHNYTNRPLFKAFGL

SEQ ID NO: 37762 - protein, 164 aa, Homo sapiens
MWGCDCYSTFRRRVSALLLRLRLALSPAWPRGMPPGRSADVTAMLCTSSSPSPLHFLCGAHLLLRQGACAAGRPDSSQPAPPPRLRPPLPPRRVCTTAEARRANAGSPELGVEIKQTMTFPFPAGHSQVKTHLRTTSVVSDPCSPPHPQASAVNLNVLFQDFSP

SEQ ID NO: 37763 - protein, 70 aa, Homo sapiens
MEPKKLEGIWACASGPDPVRRARGLSSPHLSPRDLAGIRGPGCCPADPPAPGLAAEKVFGQEAILFLSLK

SEQ ID NO: 37764 - protein, 29 aa, Homo sapiens
MLAPRPLSTMSQSNVSPSPDATAQSWTFQ

SEQ ID NO: 37765 - protein, 38 aa, Homo sapiens
MTVLVSALWSISRRSLAAELSQWKLVRGTQMRNGPRPS

SEQ ID NO: 37766 - protein, 39 aa, Homo sapiens
MPMCVFLLVWSISRRSLAAELSQWKLVRGTQMRNGPRPS

SEQ ID NO: 37767 - protein, 70 aa, Homo sapiens
MNPPMYLTLPLRRASPWQKSENAPGETHAQDKLSASQFAQFIKKLCGVTGTNDEASPGSLTSYPSHLLDR

SEQ ID NO: 37768 - protein, 61 aa, Homo sapiens
MPRQETEDTNCFSITKKIGRERWLTPVIPALWEAEAGGSRGQEIETILANTLPKREAPPVL

SEQ ID NO: 37769 - protein, 72 aa, Homo sapiens
MSPPRLSSSLGAHLPCIVPSPVLDCIRPRLLRKGKGMPLRRLGAPHRTPQRSQMGEAELRGRCPHSGGETWL

SEQ ID NO: 37770 - protein, 59 aa, Homo sapiens
MCGRTWLLTRVVTGVAAAEDSHPFFVSAERRLHGPSSLQLFHLLPCVEPGFCTESEMPF

SEQ ID NO: 37771 - protein, 39 aa, Homo sapiens
MGSPWKLLSGGGTCSPGLTPSCIGESEPGRDRAVGESLR

SEQ ID NO: 37772 - protein, 120 aa, Homo sapiens
MSLLLIIKQGTLQTKAVGHIPPSQQVRGEVPRFKTAASLVTIKFSGALYIVGAIHKQNPTMAVHRLQATLLLSQRKMGIHKPRVLQKGAISSQDMQTSTRFLGLICCLLGYAILLQISKD

SEQ ID NO: 37773 - protein, 270 aa, Homo sapiens [sequence omitted]

SEQ ID NO: 37774 - protein, 70 aa, Homo sapiens
MKLQEGHTVLLSLPLRLAGTETAEHGGPSYPFTDSALRAGEDGPDLPRALAAPRAPRAHPAGLCGAAAQP

SEQ ID NO: 37775 - protein, 138 aa, Homo sapiens
MSSWSPRRAGGPTRPCTALQALSIPARCTPSRKPWPCWSPMRGCPRTSMWLGPLRSWLVPSSSTPFSLGPMGTCTAWCEAATVSLSLRLPCSSARWPPPWRTVTSTVWSCVISSCVALSSLTVRGRSWCWRTWRTPAC

SEQ ID NO: 37776 - protein, 31 aa, Homo sapiens
MLYIHPFLWLAAEDGMLSLLEDLLPVRLQKM

SEQ ID NO: 37777 - protein, 113 aa, Homo sapiens
MSPSPRWGFLCVLFTAVHPAPSTAPVQDKCPVNTWEAMQASSQQLLQTDPRPKPFLLPPLPPLLLISAGTEVSSLVFQKSPLHTQPEGAIKTVGQPTSVHSKVLSKGSLLLGE

SEQ ID NO: 37778 - protein, 37 aa, Homo sapiens
MLHGDMLLSLPSAPATWIVSSPSSSFSAALFSTASGN

SEQ ID NO: 37779 - protein, 36 aa, Homo sapiens
MKCVQKLSVSLDFYLELSPTAQDWLLKLHNLMKNLR

SEQ ID NO: 37780 - protein, 81 aa, Homo sapiens
MQIKYFPPQKTYLGVGPQPDFQIAGLIFAASSPRRAQGARPATCSLWLRPSFRLGPPGLRPLCPARSVTVLLAATYRTQPP

SEQ ID NO: 37781 - protein, 27 aa, Homo sapiens
MCKLGDLPQHCTISWVHSRQSLLAKAF

SEQ ID NO: 37782 - protein, 60 aa, Homo sapiens
MQAQPLGVAAPASLAQVPWLTWTAQALPRAQEVLRTKWCLQEKCLAALSKPWRKTLVPIP

SEQ ID NO: 37783 - protein, 41 aa, Homo sapiens
MFRLSLFFPLLQTMGTLGSLGVTMLHLLFICLGKSCSSHTL

SEQ ID NO: 37784 - protein, 130 aa, Homo sapiens
MGDLDNSAFAAWAPFCSSSTRALSAPGHWGFEGRQFPAAPARLGGRRPRVPVGGRPRQPAKTSRHRNLRRLPPMRASGAPSLPGGRGEGRVAPGGGLRATGLRCASVDTAPPSASTALGSGTFGNRFGRS

SEQ ID NO: 37785 - protein, 40 aa, Homo sapiens
MTSWHPALLHICPTGVAVAPSCKAMLKKLWKQEGSMDSKN

SEQ ID NO: 37786 - protein, 15 aa, Homo sapiens
MGNKTCQQLHGYFSI

SEQ ID NO: 37787 - protein, 45 aa, Homo sapiens
MFAKSLLSPNSLLLAVSLCQLLLSIGEDCFSSPLNMGWACNLLDQ

SEQ ID NO: 37788 - protein, 54 aa, Homo sapiens
MATCFRVVSKRKTSMVPHLQGKHHPKVRMPRGRNHGGFLNRLSATAGARDDTAE

SEQ ID NO: 37789 - protein, 27 aa, Homo sapiens
MRRQEETTGTHIAGMQMGSVLLTLAMG

SEQ ID NO: 37790 - protein, 421 aa, Homo sapiens
MTDIVHRRPRFDLSHPYFIKAYQEECTCLRLHLQLVRGILNQQIERQREYVQRLWREDHLDNSNTFGLPLNIVCKQLISINNSCPASKNVYLLEFHPSLSLAALIPKALEHLFQEACHACRPTSASGLASLERHVLQLALDLWLTPATPEAWYSTQLQKDLFSAKVMGDPFLVGEIGLLAFKSAADEGQKQDQDSHVLLLEMFSKLLELLTLRHRLIEMSLESAHLARLYKELAWEMGFEEFHLYLRPVHFEFASHGDRADQPPPVFITSLLEDSGRVDRYSPTALVLAISEVDDNQIGKFSFYTKEAILKLLLHSGVENMQVTLACQAAQKNALMAAVQQVYFYCTPQGSCPANVKVSLHDREARGISSPPPANVRLPLSSFLFSLLPFSLSFSPAPYFLFPISLSSLLSFFLPFLVSCL

SEQ ID NO: 37791 - protein, 51 aa, Homo sapiens
MRRPLRVVLFLHPLRLGLALGFSGYLDTPFLCGQVSRGSQHQQPTLGHTSL

SEQ ID NO: 37792 - protein, 107 aa, Homo sapiens
MKVELRWPTAISTLWSTTLHPDCMEVGLSLQLDLGHHLSPRGTFCLTLAPFERFFYSISSLSCHHVKKDMFASPSAMNGQGPAVLPRLALNSWLQTVFPLGLPKCWD

SEQ ID NO: 37793 - protein, 37 aa, Homo sapiens
MRAGTRCSPAPRSRVPQLPSRPFLRFPTLGGPGLPRL

SEQ ID NO: 37794 - protein, 236 aa, Homo sapiens
MFVKALRVHLGWELQVEEKSVLEVHQGEHVKQLLRIPRPQEKKKSWFQTRIYEWDPCFQFPSRMIGTIVLAFICLYLFIVIEFCVFVYVRDELDVLENNLESYITFTNHSGVLTPVILQVKELISVTKGVWVATILPAYLTCVSYLFHILVCYRKHMKRLWAGDKHFLPLKFHNPASSESMVAIARYSGWQIAYILWGYLIIHMVQSLCGMAIMYSLVLPIVQTRAWKCCKGWALG

SEQ ID NO: 37795 - protein, 39 aa, Homo sapiens
LATLLPSLCIFAVPPYTSFLTAVLISCRKIFSFHFLQGG

SEQ ID NO: 37796 - protein, 23 aa, Homo sapiens
MPLRSGITPLLSAAWATVLILCW

SEQ ID NO: 37797 - protein, 51 aa, Homo sapiens
LSPRSPRLPLRPPFSLDELASFLFSAMEFCSVLLALLSQRNPRQQMPIRSV

SEQ ID NO: 37798 - protein, 34 aa, Homo sapiens
MSSSQAAASLWVTSMRHPLPPTWTSTCTSCAPIT

SEQ ID NO: 37799 - protein, 40 aa, Homo sapiens
KPRVLQKGAISSQDMQTSTRFLGLICCLLGYAILLQISKD

SEQ ID NO: 37800 - protein, 75 aa, Homo sapiens [sequence omitted]

SEQ ID NO: 37801 - protein, 34 aa, Homo sapiens
MHCPVRCFYWRSLCAELLASVCVGMGEKCGRTMR

SEQ ID NO: 37802 - protein, 102 aa, Homo sapiens
LDTSLKSSRLRPSPARGEVRGVRCQPLAPGRASLLMHRGRARPSDSSRGGRAPSVSFALEPPARVGFSGIPTVQDYSTSRLITFFSSSSAKASLKKNITNFF

SEQ ID NO: 37803 - protein, 38 aa, Homo sapiens
MCGKGMGMCGLGAGAPTHSGGQAVSRTTCCKAREGRRR

SEQ ID NO: 37804 - protein, 31 aa, Homo sapiens
MEMLFIFVWTGFVSLLITVCFFVCLLCVWRY

SEQ ID NO: 37805 - protein, 31 aa, Homo sapiens
MCWFTPVILALREAEAGGLLEPRSLRPAWAT

SEQ ID NO: 37806 - protein, 60 aa, Homo sapiens
MAKVNLRFSSCLLLSICLDDKPSADELCFWTDHGRSQLTCPSLGVSQGCTDEETETENPE

SEQ ID NO: 37807 - protein, 57 aa, Homo sapiens
MVSHRKDWRRVNLRFSSCLLLSICLDDKPSADELCFWTDHGRSQLTCPSLGVSQGHL

SEQ ID NO: 37808 - protein, 60 aa, Homo sapiens
MVSHRKDWRRVNLRFSSCLLLSICLDDKPSADELCFWTDHGRSQLTCPSLGVSQGHARSS

SEQ ID NO: 37809 - protein, 91 aa, Homo sapiens
MVSHRKDWRRVNLRFSSCLLLSICLDDKPSADELCFWTDHGRSQLTCPSLGVSQGSLTLSSRLECSGTISAHCKLCLPGSRHSPASVSQLH

SEQ ID NO: 37810 - protein, 56 aa, Homo sapiens
MVSHRKDWRRVNLRFSSCLLLSICLDDKPSADELCFWTDHGRSQLTCPSLGVSQGS

SEQ ID NO: 37811 - protein, 57 aa, Homo sapiens
LKLFSSKVLKVNLRFSSCLLLSICLDDKPSADELCFWTDHGRSQLTCPSLGVSQGHL

SEQ ID NO: 37812 - protein, 67 aa, Homo sapiens
LKLFSSKVLKVNLRFSSCLLLSICLDDKPSADELCFWTDHGRSQLTCPSLGVSQGCTDEETETENPE

SEQ ID NO: 37813 - protein, 64 aa, Homo sapiens
VILTCTKVNLRFSSCLLLSICLDDKPSADELCFWTDHGRSQLTCPSLGVSQGCTDEETETENPE

SEQ ID NO: 37814 - protein, 82 aa, Homo sapiens
VVNLRFSSCLLLSICLDDKPSADELCFWTDHGRSQLTCPSLGVSQGSLTLSSRLECSGTISAHCKLCLPGSRHSPASVSQLH

SEQ ID NO: 37815 - protein, 103 aa, Homo sapiens
LAGRRIAHSGGAAVFVGWGSGLQLAAGIRAQPGCKFSPVALSAHSQALCMSDTSVCHGTWPCSGLAPAPEPAGGLSESCSVPRLHSERHYLPPSFNHTISWWI

SEQ ID NO: 37816 - protein, 28 aa, Homo sapiens
MLESFGTPLISLLLLTFIYYFSKCESNT

SEQ ID NO: 37817 - protein, 16 aa, Homo sapiens
LLSSRLWVMLFLTADG

SEQ ID NO: 37818 - protein, 30 aa, Homo sapiens
LQRSLVHVCMCAFVCVCVSVCSAPVRLQPL

SEQ ID NO: 37819 - protein, 310 aa, Homo sapiens
LLATWKFSSGHNFCRVDLGKTPAPRIPSKLSSAGHPRRPVMPTRGEEAVLSRPLLPRPPRRPGLGCGGPKAPALLVISRPEPRQASAPSRKPGRPGATGKKARSRKPGCCGPTNHKSYERGSRRREKSQYRLVPATFGKKKFLTRRGACFALGRVALAGAWVTPIPPWRLTSCRGGPPASSWPRAQGASCPGTADAGIASPGRAGGEGGRGGRGTAGCSPPWGIRGAEPRWRPRGPGSRERTAEWPPELGLLLSPTHLPSDTVSTLQAAGRGGAPNQFAPGLSARLPHGNRTATGTDGVTYLPMQRQRLA

SEQ ID NO: 37820 - protein, 74 aa, Homo sapiens
LSVSCLLLLCLCAGKVQVLIRPLSSFCGLSKKPQGLSGPGPAGLTISGSWDTLPDHLCSWCGNLGALEGGGFIY

SEQ ID NO: 37821 - protein, 10 aa, Homo sapiens
LLLLLLLWDR

SEQ ID NO: 37822 - protein, 35 aa, Homo sapiens
MTVVFSLLGTLRAPAPFSSPLQGCRRSRDLVGVGG

SEQ ID NO: 37823 - protein, 33 aa, Homo sapiens
MTVVFSLLGTLRAPAPFSSPLQGCRRSRYCPRC

SEQ ID NO: 37824 - protein, 26 aa, Homo sapiens
MVAAVGDVQFFFLFPSTDAEQTCLSA

SEQ ID NO: 37825 - protein, 84 aa, Homo sapiens
LLSAGPLSLGLMTSLLCGTSRFLPTVNSGPPSDHCSLRTRPGLGRADPNKGKMVNANVPLQFYRQCAVVPPPPLRVLVGTRRGL

SEQ ID NO: 37826 - protein, 102 aa, Homo sapiens
LLSAGPLSLGLMTSLLCGTSRFLPTVNSGPPSDHCSLRTRPGLGRADPNKGKMGPGDPHEGALTFQKPRLTKRPRYLVCPTLDSNRRPQPLRNRRQLRGNQV

SEQ ID NO: 37827 - protein, 85 aa, Homo sapiens
LLSAGPLSLGLMTSLLCGTSRFLPTVNSGPPSDHCSLRTRPGLGRADPNKGKMRKSSLIHQPAIGSLQRVAERRGALTLSTKRWN

SEQ ID NO: 37828 - protein, 44 aa, Homo sapiens
MSLAGLQHSPHGHSHAAFRTFLKEMPKDSANTGEAEDTRSLDVK

SEQ ID NO: 37829 - protein, 109 aa, Homo sapiens
MSSGLWLKMLLELVHQVLPVHFTRLVTLCLNLDHQVTHVFWIQADHPFQSLGINLSMMVVQKSLGIWLRLPCQRKMNGRLSLHQQDSRQLRILSLASQRIRNIRSASMP

SEQ ID NO: 37830 - protein, 54 aa, Homo sapiens
VKLGKIHVTLLGKNHWMMVVLLLPIMWLRGEMLPAPSGHLSQLHQRKRVTSLSI

SEQ ID NO: 37831 - protein, 12 aa, Homo sapiens
MKLMCWKMIALI

SEQ ID NO: 37832 - protein, 38 aa, Homo sapiens
LMERNIFLLLMILNLMMKGSILLRWRARRPQLGCLSQV

SEQ ID NO: 37833 - protein, 25 aa, Homo sapiens
VLAKVTALYPSMFLIGLCLLPSSAS

SEQ ID NO: 37834 - protein, 18 aa, Homo sapiens
LSHCFVLLLTQGLGPMTL

SEQ ID NO: 37835 - protein, 67 aa, Homo sapiens [sequence omitted]

SEQ ID NO: 37836 - protein, 41 aa, Homo sapiens
LAAVPLASGMLSEEKLKGRLCPKRSLCAPAFPPDLQVMRVL

SEQ ID NO: 37837 - protein, 131 aa, Homo sapiens
LTSAMPRWLLLSLTFAGLFPLRRRQLLGSCGGREGGGPDQPAGSPAPLRPPLPRTLRLRKYRGNPLPPEVRGSLPEGAPWSRAPLGGHLEARCGPRTREERAAGAAATAGGGAGSPGAAEGRPVLHMLPLG

SEQ ID NO: 37838 - protein, 32 aa, Homo sapiens
MNFFHLLWRQFSFSSVIPSCYSVPSHPVFLGK

SEQ ID NO: 37839 - protein, 42 aa, Homo sapiens
LAQGRRLHHISDTSLSFSPLLLPPAHIASPLPPPSPAGLLAS

SEQ ID NO: 37840 - protein, 40 aa, Homo sapiens
VSLWRSPFPLLLLPLLPPPIIIITTISAPEEDTLTQDLKH

SEQ ID NO: 37841 - protein, 26 aa, Homo sapiens
MALLDLLMLSLIKTLQHFSQAVFTHY

SEQ ID NO: 37842 - protein, 38 aa, Homo sapiens
LHSLWRLFRRICSLLCQFLMAAGSPWHVAASLLSLLSL

SEQ ID NO: 37843 - protein, 46 aa, Homo sapiens
MMPPVRDGTRHSMQMTTQREQEWLYLYQTKSTLSQKLSQETLKYII

SEQ ID NO: 37844 - protein, 10 aa, Homo sapiens
IWMLVIGVQY

SEQ ID NO: 37845 - protein, 47 aa, Homo sapiens
IGLKRRTEPHTADGPELAERRLPWLLLTVSTSCTGKSPGLAIAIWKL

SEQ ID NO: 37846 - protein, 50 aa, Homo sapiens
MAGACPLCPAAACRAGSHPTSPSPSRHPRKRPRPLASRTACCLRVFRIGG

SEQ ID NO: 37847 - protein, 37 aa, Homo sapiens
MNMKKCPMSLLATLFCGSSHWWCLGSPLSSGSWAMGL

SEQ ID NO: 37848 - protein, 117 aa, Homo sapiens
MGAFLLATSLKWNLLVALLPLQLWCYTEKLEETGFHYVAQSGPKLLVSSSPPISAFQSARIIGMSHYIQLLLVSSDSCFDTTDLSFKTDKGKRETSESLIKVEASYFYQRIHCAWTL

SEQ ID NO: 37849 - protein, 60 aa, Homo sapiens
MRRSWRRAWGWMVPSQPRSLLAAPPGSCRRSVRRMSPRRGGSRGPRPGRRMALWNCQPRA

SEQ ID NO: 37850 - protein, 10 aa, Homo sapiens
LITFQFCFVF

SEQ ID NO: 37851 - protein, 16 aa, Homo sapiens
IKYWSKKLVTFLYMVR

SEQ ID NO: 37852 - protein, 11 aa, Homo sapiens
MFIVMLLIMHC

SEQ ID NO: 37853 - protein, 27 aa, Homo sapiens
LDFQWQLQWPFMWLAVSLVVTSTQLCL

SEQ ID NO: 37854 - protein, 87 aa, Homo sapiens
VAGLCLSLLSPGWAPGVRSSRRASWAYSEIGHQPPFLLQTWSEPVFPPWDLKTVPSACTVDHSRATGQPVMVPRRSAVDPALWAALS

SEQ ID NO: 37855 - protein, 26 aa, Homo sapiens
LERGLLKITAAAFGLGSVLSACARTG

SEQ ID NO: 37856 - protein, 33 aa, Homo sapiens
MTAFLNTRLYIFNFKMFLCALQIFFTVSDCMEI

SEQ ID NO: 37857 - protein, 35 aa, Homo sapiens
THHRLAFQDTSCISDLLHLCYLGTSVILAASTCLS

SEQ ID NO: 37858 - protein, 20 aa, Homo sapiens
ISKYTRLIFRSFSVLLSVVV

SEQ ID NO: 37859 - protein, 45 aa, Homo sapiens
RRRLCGAELRRTSQLGQWLRRLPAPPLRFIWIQGWLSTVPAALSS

SEQ ID NO: 37860 - protein, 30 aa, Homo sapiens
LVLFSLFLLHSRFPPLCWSLPCYPVIKNKE

SEQ ID NO: 37861 - protein, 24 aa, Homo sapiens
LFFVVYFCIFTCGAVASPHIKYRT

SEQ ID NO: 37862 - protein, 11 aa, Homo sapiens
LLWLYRITLCL

SEQ ID NO: 37863 - protein, 55 aa, Homo sapiens
IVSQCILPSWLPTLAAKAAATCCSLHSFGKRKGTSDLPDRFLSQQTICRRNKDGC

SEQ ID NO: 37864 - protein, 73 aa, Homo sapiens
TAAGGGGDTKQEASGRPELGADIHTHIHTDTQSHTHSHTLSLSLPLSFSLSLSLCPFLLDRSTVIHRNKHTRT

SEQ ID NO: 37865 - protein, 18 aa, Homo sapiens
LASIAFVLVSNCMVSVDL

SEQ ID NO: 37866 - protein, 46 aa, Homo sapiens
RRNTCGVCMAALYLGHQLPLLLPHEELLGQPNWEPRCLGLVTTKAL

SEQ ID NO: 37867 - protein, 14 aa, Homo sapiens
KPIKVFLLLGAIIF

SEQ ID NO: 37868 - protein, 18 aa, Homo sapiens
IHCLSLVFYSPWLLLISR

SEQ ID NO: 37869 - protein, 10 aa, Homo sapiens
ILLMYYFTLQ

SEQ ID NO: 37870 - protein, 45 aa, Homo sapiens
MGLTPLRPGLHPHLPTSPTTATSPLRPSTLASLIVAPSGVCQGLG

SEQ ID NO: 37871 - protein, 37 aa, Homo sapiens
IQLRLSSESSHMVALGRSLARRVMPAILLLKYLPGME

SEQ ID NO: 37872 - protein, 26 aa, Homo sapiens
IKKRPLIRRRLLVSFLGTHSGFLQSR

SEQ ID NO: 37873 - protein, 41 aa, Homo sapiens
LLPIISSALKNLSCPQFIMSRRFIFSLCFFLFQFILNAYFS

SEQ ID NO: 37874 - protein, 10 aa, Homo sapiens
IGYLVYTLCI

SEQ ID NO: 37875 - protein, 13 aa, Homo sapiens
VWDFWVFSWLASC

SEQ ID NO: 37876 - protein, 132 aa, Homo sapiens
KWPLLPAVVVQCRVRAASVASCKESLRGPKSAALLLAFASSSSRFPTVKSQRHLQRPPGPTETDPQRLARSCLLHREPPSTGEGLAGGVGRWRRRHGEVPEGRPGRCRSYVTLPLLHGPVSVRRWETRRPNP

SEQ ID NO: 37877 - protein, 18 aa, Homo sapiens
LSTPLPNVEVLQESVLWR

SEQ ID NO: 37878 - protein, 58 aa, Homo sapiens
LTRSQAGLMASLKLMLSAGPFVGWVSQMIPFSDWPRPMASSQRTFDWRESQMWNICHK

SEQ ID NO: 37879 - protein, 32 aa, Homo sapiens
MQSAKSPWKSCFPSTSWISGLLSSSSWPPLSS

SEQ ID NO: 37880 - protein, 32 aa, Homo sapiens
MHILSLSLFLSLSLPLLPSLPPSLSFLQKCQV

SEQ ID NO: 37881 - protein, 16 aa, Homo sapiens
KISRALAELHLLAFLA

SEQ ID NO: 37882 - protein, 14 aa, Homo sapiens
VVLGVLLTIILVPG

SEQ ID NO: 37883 - protein, 16 aa, Homo sapiens
LILPVLSLPAVLVVLC

SEQ ID NO: 37884 - protein, 26 aa, Homo sapiens
KYYAVATGFLLWNVCICWLVLPQLCY

SEQ ID NO: 37885 - protein, 28 aa, Homo sapiens
MGTLGSLGVTMLHLLFICLGKSCSSHTL

SEQ ID NO: 37886 - protein, 93 aa, Homo sapiens
MDSKLGVKVHTWVSEAQYRFLEQATLYKLKFMKEWIQVKLHQPPEYDSNIPSGIKENASEDWNTAQPSQPSFTTDVSTLVIFLLILMLLSLYN

SEQ ID NO: 37887 - protein, 31 aa, Homo sapiens
KLTLVLALGVMSRDGGTDGDACTCVCMGAYV

SEQ ID NO: 37888 - protein, 54 aa, Homo sapiens
LMFLLRSSSSFPALLLPLQISPPSASDWIKGNHFSKGSLALSFQAILQPPEPST

SEQ ID NO: 37889 - protein, 74 aa, Homo sapiens
LFASFVFGSFFFLPNFGFISRRIWLWGKRKKSRITRSTTTNNNKNHQDIFLQISDGFKFMKQLSPFAISIWISE

SEQ ID NO: 37890 - protein, 36 aa, Homo sapiens
IYHIPFLLQIFLLSPFLWDLSCYIPSELTNAFTFFP

SEQ ID NO: 37891 - protein, 64 aa, Homo sapiens
LPDSPGQPLPAASLRLEPTPTSQTGQGAHPFMLLWLLMLGRSASFCSVADKLQWTLAQRTGPHP

SEQ ID NO: 37892 - protein, 38 aa, Homo sapiens
MFSQVYFLFLIFSPSLFFYFFFMEKWGNLAVSILKTEV

SEQ ID NO: 37893 - protein, 15 aa, Homo sapiens
MLKFLWGSIFALAFW

SEQ ID NO: 37894 - protein, 69 aa, Homo sapiens
IIAPKDYNFKSHRRRQIAHGHASCWLYTRTKTDKYPHHDVTHIAADFFREKCVLLLFETSVVVALYCNI

SEQ ID NO: 37895 - protein, 39 aa, Homo sapiens
KMLGCLLVVFLCCLILGKLLCKAKNPVNTILSFTGRHYW

SEQ ID NO: 37896 - protein, 56 aa, Homo sapiens
LLAARNLRTKFEVISECAGLHSMNSVSSHLIHRYIFLFLPIFSFPQIFLLLFYHLE

SEQ ID NO: 37897 - protein, 66 aa, Homo sapiens
LGRPPVGMGLSVLLPLCLLGPGRFTSGQKPLDTPGLGAAVLSVRKAGLKMRSHLTPSVCTVPSPGS

SEQ ID NO: 37898 - protein, 67 aa, Homo sapiens
LPKTPRGARMSLSRAAQGPHSWLLTLASPMAALQTLLLSSPHIRTCCSHSGVLKSMNRYCCIFHNAD

SEQ ID NO: 37899 - protein, 126 aa, Homo sapiens
LPAPNLPAPGRAAPQPTGLAARLGWDRCGACVVAPLGAGVAAAGTVLRTAEGQAAPAGLVVGAAPAAAAAAWAGEAARTAPDSSWRSGLPTWRRATWRPSVRGTSGTGRTRGCVRRTPGCGSRTGG

SEQ ID NO: 37900 - protein, 46 aa, Homo sapiens
ISANLGFWVLASFLLFVDFGVQVPQLLRAAEDLLGPHINEAATWRV

SEQ ID NO: 37901 - protein, 15 aa, Homo sapiens
VFFFWFLFCFSSFKG

SEQ ID NO: 37902 - protein, 24 aa, Homo sapiens
MWWVLTLFFHKTMWVSMVAINKTP

SEQ ID NO: 37903 - protein, 62 aa, Homo sapiens
IVSQCILPSWLPTLAAKAAATCCSLHSFGKRKGTSDLPDRFLSQQTICRRWLFAFIRNKDGC

SEQ ID NO: 37904 - protein, 14 aa, Homo sapiens
LLLFCTLSFSFIFF

SEQ ID NO: 37905 - protein, 26 aa, Homo sapiens
RERIMLFNLRFLFVKRIIWILGYFVN

SEQ ID NO: 37906 - protein, 18 aa, Homo sapiens
LGSQIFLPLAFGSTLFSC

SEQ ID NO: 37907 - protein, 26 aa, Homo sapiens
MRSQMEKKLKVFSFFTLHGGAWLLRL

SEQ ID NO: 37908 - protein, 28 aa, Homo sapiens
LFLKMNLVLYLTMSIQMLQIDSFILRLM

SEQ ID NO: 37909 - protein, 56 aa, Homo sapiens
LETRRPAAGQAAAERAAAWRRMGTRSRAAVAAVAAVAVAAAGKQLTGRRRRRRWRR

SEQ ID NO: 37910 - protein, 32 aa, Homo sapiens
LVFFGNQCSCKSNVCFVLLLLKLMLLYITMEF

SEQ ID NO: 37911 - protein, 31 aa, Homo sapiens
MQSSHSSILWSASLGCVATHLSFMSSSAMPR

SEQ ID NO: 37912 - protein, 84 aa, Homo sapiens
VEGLKATLAPRRSARSTNSTLSLLSSSLLFIFKFLFISPCVTTFFPSAPLPVPLPAPPPPCYPTLETTAVGRVPSSCQPHLLSC

SEQ ID NO: 37913 - protein, 109 aa, Homo sapiens
LARVLTSFSDRDLVAGSRKSPALLPDPFLLSLAGFLLPASLASISQPRDSLLYSRAPVARHPEPSHLQPSVFCPSLTSEGPALSFSPESPRFLSLPCLPALDSQIPADV

SEQ ID NO: 37914 - protein, 19 aa, Homo sapiens
LSVVYSINMFLAGLSGSCL

SEQ ID NO: 37915 - protein, 34 aa, Homo sapiens
MCPAARASAAARAAAAARAAGMPGRRAPGLGPRR

SEQ ID NO: 37916 - protein, 116 aa, Homo sapiens
LELRPCVFSRLLIRRGALGAPAWVAVPSVCGPQFLGPRRGFVGAPGDIWAVLAVSGSRARSLPGLTAADLVLHFLGGAWTLALRGRPVPRSVATDPRTLFAGDSRSLRLPRMMACD

SEQ ID NO: 37917 - protein, 63 aa, Homo sapiens
MKTQKRKSSVPSVATGPSSRKVSAGLLWGPLICWPHRALACQRPQAVRASSPSLVPPLCQSSP

SEQ ID NO: 37918 - protein, 47 aa, Homo sapiens
ILYTPMILQRKHPSLLLPLLWQLKCICSSTLKRRKRNNLSLIPKLPH

SEQ ID NO: 37919 - protein, 12 aa, Homo sapiens
IKKFLQVMFMIC

SEQ ID NO: 37920 - protein, 89 aa, Homo sapiens
LLPGDPLSSHLLLLPLLLHRARARTPPGCRSRTAPARTTRRCRCCGTRRSRWPCPWCTRWWRRSASRATSSLCGCCAGAWGPDPRRSSS

SEQ ID NO: 37921 - protein, 55 aa, Homo sapiens
LVLAKFVILRNSAVLSSTASFCLPCSFPDVIQVAEFRCPCFGSLSLCLSFFPCSR

SEQ ID NO: 37922 - protein, 7 aa, Homo sapiens
VWFLLGF

SEQ ID NO: 37923 - protein, 52 aa, Homo sapiens
LVRQILFFFFPRALAPCPLVAFVGARHAAGRPRTRSSPAGKYASDSSLFSNV

SEQ ID NO: 37924 - protein, 27 aa, Homo sapiens
ICVYSYLTVLFFLLIYINSFLPFFLNF

SEQ ID NO: 37925 - protein, 39 aa, Homo sapiens
VANRHFSYFLKNSNLFATFISVDFFFLVVWGPLAKRAEV

SEQ ID NO: 37926 - protein, 31 aa, Homo sapiens
RCPLLASLLFSSLPPPLLCPRRLRPPPSAGV

SEQ ID NO: 37927 - protein, 99 aa, Homo sapiens
LRGKKKREGEREKEEQERSRKEEEVAKNQLPCWICLSQHLGEALGFFLKGLIFRTPHLSSLLPASSLLWWLGCFFHDFLNLDWAVLCVKPISCDLLLTV

SEQ ID NO: 37928 - protein, 15 aa, Homo sapiens
IYYGLFFCWILSCKT

SEQ ID NO: 37929 - protein, 60 aa, Homo sapiens
LPLRAPLSLGPFRTLFAHKLPKKKEPTCWYCWLVSLWSTSLLLLCYLLAPLPMSGWFPIR

SEQ ID NO: 37930 - protein, 18 aa, Homo sapiens
VRPPWLWRSLLSGSFCLS

SEQ ID NO: 37931 - protein, 13 aa, Homo sapiens
MYVSPGLFFFFFF

SEQ ID NO: 37932 - protein, 43 aa, Homo sapiens
IILTLSQCQVSKCLLNDHRRLVLVVGVWGSVLVIWMLVIGVQY

SEQ ID NO: 37933 - protein, 35 aa, Homo sapiens
LTIFFLPLATSLPTCFLSTLVQLFLQRPRSSELHI

SEQ ID NO: 37934 - protein, 54 aa, Homo sapiens
LALLQGSCWQLPIGLFWPQQLRWPRPLGASVPLPSSLWLLASPLERLLSTWLTS

SEQ ID NO: 37935 - protein, 11 aa, Homo sapiens
KKVRFPWILAL

SEQ ID NO: 37936 - protein, 62 aa, Homo sapiens
LSLTSDFLQDKNSKNLFPFLQIVKMINHIKSIESPACCFPKSQYGLGMVLFVLLWGIRGSLD

SEQ ID NO: 37937 - protein, 58 aa, Homo sapiens
MAVLCTEGSDVSKVRSANLGRSPEIEPGSSSSLPFLPPHRVSLLFFFSDILSWFMFLR

SEQ ID NO: 37938 - protein, 68 aa, Homo sapiens
VGCLGFFFFIFPFLFCYLRQSCSVTQTEVQWLNYVSLQPQTPGHKQSSHLSLPSSWDYRCTPPHQANF

SEQ ID NO: 37939 - protein, 54 aa, Homo sapiens
LHTLLPLRLKFRILVTSALIFHLQHPQPWHPGWEGLHLSLPSFPVFKTFLEGDT

SEQ ID NO: 37940 - protein, 151 aa, Homo sapiens
LFFILILLELKLSRRKFAGDYRGREKVEIQCKQLQMFISNSWVYLSCPGVSLWFHVTLSYCLPLPPHSAPTLFIPSISNPPPYSSCSRNFKCLFPPRQDDSVPFSNCSRAHSGSQQQNKGSSIQQTPPSLESSCTYIFFKKFIAGHSGLHL

SEQ ID NO: 37941 - protein, 57 aa, Homo sapiens
LRWSLALLPRLESSGVISAHCNVRLPGSSDSPPSASRVAGITGAMFQNRVRPLVKKN

SEQ ID NO: 37942 - protein, 8 aa, Homo sapiens
MNSVLAAR

SEQ ID NO: 37943 - protein, 23 aa, Homo sapiens
MLTCFIKACERESPLARGHCSLI

SEQ ID NO: 37944 - protein, 20 aa, Homo sapiens
VRGLLIRILVLSVSVCEWIP

SEQ ID NO: 37945 - protein, 15 aa, Homo sapiens
VAYESVMFAYFLTVA

SEQ ID NO: 37946 - protein, 143 aa, Homo sapiens
MGPPGPRSKFTSTPPPIPPSAPLASAAWCHHRAAMGWPGPSPGALRGQPLWSTRVTVGGTPVTRLPTAQPLGTLSTAAARRMPASCASVARRAAGHLKLTTLCLGARPGTELAGAQGARRPTIISRTGIQGAWAAPRPPGSPW

SEQ ID NO: 37947 - protein, 111 aa, Homo sapiens
LDGGTGKEEPGFFGKLAAAVAYGKLKSLSNLILCIFVLDLLKKIKRPGLPLLWHSIDERHQWSSPPPPQAWNLGNDWFLSFHTTAEGFCPHLVLCEVCWTYLPESSEDDVC

SEQ ID NO: 37948 - protein, 71 aa, Homo sapiens [sequence omitted]

SEQ ID NO: 37949 - protein, 89 aa, Homo sapiens
LLLLSCLLAVPAVPAVPALSPLLPRLLDAGDASELVIGALRRLGLIPKISHYVHANQRSIVMTPGGHPVTPITALSTSTQRQSFLASLL

SEQ ID NO: 37950 - protein, 56 aa, Homo sapiens
LLLLSCLLAVPAVPAVPALSPLLPRLLDAGDASELVIGALRRAQAPSSARGAQAAP

SEQ ID NO: 37951 - protein, 40 aa, Homo sapiens
LGRGQGVLSAGIPNPGILMSPVIFLAGLIIKVSNSTAVLE

SEQ ID NO: 37952 - protein, 80 aa, Homo sapiens
MPAGVGPADPGHWSHSSFPTDGPEGPPAAPARVSVACKERKRWEQPARGPASCIGASGRGIGSSRHPEAWACKHRSSGWP

SEQ ID NO: 37953 - protein, 48 aa, Homo sapiens
MWKRRPSAVLGEPLLRRMTLTLRPGLASPSLLQTHRTGLMGRAQAKRS

SEQ ID NO: 37954 - protein, 59 aa, Homo sapiens
LRAVGPFMGLTWWIHIKPVSVGTSVLAAGGEGKPDPAPPGGPSGVWLGVKGALWQYGVG

SEQ ID NO: 37955 - protein, 10 aa, Homo sapiens
MGTGRDRAAG

SEQ ID NO: 37956 - protein, 108 aa, Homo sapiens
MVRGGSSFFREGAGGPRGALGNRAGGRDRPGGPGGRKDQASGRNCGAGTDQEGAVGRVQPGSARRERGPRFGHSEKPAGAGSARSSLDLCRESLAPFLFICLNITPNF

SEQ ID NO: 37957 - protein, 63 aa, Homo sapiens
LGPRSRALGRQLPWCFSLLGRGLGLWLPCPWGSPGHSRGLESPGQPLLEVGLSVYGRLQGQQA

SEQ ID NO: 37958 - protein, 96 aa, Homo sapiens
MLSLEETEAGEEGSRITLPGGGGCRRGDFPWDDEDFRSLALLGAGVAMGFFYLYFRDPGREITWKHFVQYYLARGGPAGSREQTICACYSCPWDLF

SEQ ID NO: 37959 - protein, 125 aa, Homo sapiens [sequence omitted]

SEQ ID NO: 37960 - protein, 144 aa, Homo sapiens
MLSLEETEAGEEGSRITLPGGGGCRRGDFPWDDEDFRSLALLGAGVAMGFFYLYFRDPGREITWKHFVQYYLARGLVDRLEVVNKQSVRVIPAPGTSSEKFLWFNIGSVDTFERNLESAQGELGIEPHNQAVVVYTSESDGSFL

SEQ ID NO: 37961 - protein, 100 aa, Homo sapiens
MLSLEETEAGEEGSRITLPGGGGCRRGDFPWDDEDFRSLALLGAGVAMGFFYLYFRDPGREITWKHFVQYYLARGLVDRLEVVNKQSVRVIPAPGTSSET

SEQ ID NO: 37962 - protein, 199 aa, Homo sapiens
MLSLEETEAGEEGSRITLPGGGGCRRGDFPWDDEDFRSLALLGAGVAMGFFYLYFRDPGREITWKHFVQYYLARGLVDRLEVVNKQSVRVIPAPGTSSEGAMLTGPPGTGKTLLAKATAGEATVPFITVNGSEFLEMFIGVGPARGSTLPPTSWCWLAPTALTSWTRPSCGLAGFIARFTLVPLTLKAGPPSLRSTCAH

SEQ ID NO: 37963 - protein, 205 aa, Homo sapiens [sequence omitted]

SEQ ID NO: 37964 - protein, 48 aa, Homo sapiens
MRCARSRGRVAAAAVGAPGPGDAAVARAPPRPHRPHGAPGGRRHRRDR

SEQ ID NO: 37965 - protein, 33 aa, Homo sapiens
MLSGYLCMVEQSHCNFHLWFFCNFQIFHILYFI

SEQ ID NO: 37966 - protein, 96 aa, Homo sapiens
VTEMGWEGPNSRVDDTFWASWRAFAQIGPARSGFRLETLAGLRSRRLKQPKRLQEAVSVRFGGRRCAGSCILSSACEKLKDVEKSRPWNPALLQPS

SEQ ID NO: 37967 - protein, 20 aa, Homo sapiens
MGVNQRMRLLTLCTLAWPIP

SEQ ID NO: 37968 - protein, 36 aa, Homo sapiens
LGGGQASGSREPDPHLSSKQAQRVSCTGAWAGGRCF

SEQ ID NO: 37969 - protein, 33 aa, Homo sapiens
LTPDNMVGTVYILVFVFCFLETDSMLPRLLWNS

SEQ ID NO: 37970 - protein, 70 aa, Homo sapiens
LQVAPETCPCPGVHLRVSVLVPSCFFVLFCFVLFLRPNLVLSPRLECSGVILAHCNLHLPGSSESPASAS

SEQ ID NO: 37971 - protein, 47 aa, Homo sapiens
LLLPGCAALAVCLTSHKCVCGVTTGTTNSAALPLFSLWLGWLHHGQG

SEQ ID NO: 37972 - protein, 34 aa, Homo sapiens
MEASSNLQFGQWVGLGICAPGGLQILPGIPPNPH

SEQ ID NO: 37973 - protein, 77 aa, Homo sapiens
VPAGNAHLPRVFLTVLLLHLMHEQVKEKAHRADGHSRVGSTYLPLEARAANLTDPVINSTLGAPSSYSHLPAPPTPQ

SEQ ID NO: 37974 - protein, 46 aa, Homo sapiens [sequence omitted]

SEQ ID NO: 37975 - protein, 119 aa, Homo sapiens
LPGDAQGRSFLARVLTSFSDRDLVAGSRKSPALLPDPFLLSLAGFLLPASLASISQPRDSLLYSRAPVARHPEPSHLQPSVFCPSLTSEGPALSFSPESPRFLSLPCLPALDSQIPADV

SEQ ID NO: 37976 - protein, 66 aa, Homo sapiens
LRISCPSVEKALMCPLSRVGLGGRGTPRPGDGKVTGGPRMRKRSHGQSGIGCGVLAAVLWHCVLPP

SEQ ID NO: 37977 - protein, 115 aa, Homo sapiens
MGRKSGSRTGSLCALWGPTNPPRLQAFLPHAGSPARTMSPLCWLRRGTWRWGKALLLDISTPPHHWQGNWWRGRGGGGRHSRQQLEFYNGSSSQQDREGAWEGDAREARPCLPSF

SEQ ID NO: 37978 - protein, 94 aa, Homo sapiens
LALTALQLCSLPAQSLCRLGGCSWGSGHRAPGPGYCLLRTLASGLENRSPGWGRAWGQSHLQRRQQSGAGCRDGLARWQLQVPGRQALDAPKRW

SEQ ID NO: 37979 - protein, 54 aa, Homo sapiens
LAYFVTGHLISTCVGLILLLEMSLYPALHTYLGGVKRAQEGPTDTAWLRGLGRR

SEQ ID NO: 37980 - protein, 78 aa, Homo sapiens
LSFFTQRQSQASSPSQLPLKTSWAQAYFVTGHLISTCVGLILLLEMSLYPALHTYLGGVKRAQEGPTDTAWLRGLGRR

SEQ ID NO: 37981 - protein, 38 aa, Homo sapiens
LEIHLSSSFPLTTLGLTCTSAVRAEFNKHNSLVFQSTC

SEQ ID NO: 37982 - protein, 67 aa, Homo sapiens
VPFSSQPHPESFAALLLYFFPIAFWESTSGFLSHCSSPGVLGGRLGSCLPRPTMPGEVRMELPHSAN

SEQ ID NO: 37983 - protein, 13 aa, Homo sapiens
VLWIYHSLLSLII

SEQ ID NO: 37984 - protein, 74 aa, Homo sapiens
VALGWLSPLSWGWMGFLSETEGLGMGAPPFPWQLGTQWTLQSYPQNVSEMLTSMARIHLFGCQKCFVLHRRKQA

SEQ ID NO: 37985 - protein, 31 aa, Homo sapiens
LGLERLVTWLARGGARGVGSAGLGLVAPAAA

SEQ ID NO: 37986 - protein, 38 aa, Homo sapiens
LTRPLCPRSVSLGFVCVGVGCMCVSYPRHLRVVCLETG

SEQ ID NO: 37987 - protein, 38 aa, Homo sapiens
MAKPWPICVCVTPLPSRLGLAAGIPLMRWVPGTLEPLV

SEQ ID NO: 37988 - protein, 47 aa, Homo sapiens
KKPMTLNKRPFQVSPTKAMTTWMIWMMKMMMTMWTARTPLTRTTLMM

SEQ ID NO: 37989 - protein, 8 aa, Homo sapiens
IFIFSISL

SEQ ID NO: 37990 - protein, 15 aa, Homo sapiens
RDKILSYFQKLLLVL

SEQ ID NO: 37991 - protein, 14 aa, Homo sapiens
LVPWVICLLLCPCK

SEQ ID NO: 37992 - protein, 102 aa, Homo sapiens
MSRGVRGQGAPSLLLQPVKPGTAAPSPRAEAVSAARSDAPRPKGREIRGEPGDLRPRGAEGCTAPAPTGLFREDASPSCPREVLGSWMRKSLLSPAPRPRAF

SEQ ID NO: 37993 - protein, 46 aa, Homo sapiens
MAAAGLLPPHLLLPGEVAAASAAIAATGTSAAARELGLSRPTLPRP

SEQ ID NO: 37994 - protein, 46 aa, Homo sapiens
LSAAFFIILYIVTDKYCITVHRETGGHFWATWFVFIRFCWVGFFFN

SEQ ID NO: 37995 - protein, 36 aa, Homo sapiens
LHLLKKITALVWLLGTGALGHLGGGGSGEFDGGQPH

SEQ ID NO: 37996 - protein, 55 aa, Homo sapiens
LFCKTHRVSLTHCRYFPGSMVNQHHLSVSSLLTSPGLSVVYSINMFLAGLSGSCL

SEQ ID NO: 37997 - protein, 49 aa, Homo sapiens
MSRLSLSWESLTNAIWPLDLQDIKGYLPNPLPQRVNLRKQILSISKEPN

SEQ ID NO: 37998 - protein, 118 aa, Homo sapiens
LPADLWIRSLLTGCVTLGPELPLSGPQRPYEGPLLQEHPHDIAFGGAPVACRIACGLCNLLRFKTDGHMCQWGSLSPGPKKQGTKFKTLASSQPLKPWPPEFPFLSLSFYFFYFYFYF

SEQ ID NO: 37999 - protein, 79 aa, Homo sapiens
LLKPAILRLEMLLGVFWFCETAVPKLAGFLEESVLKASFKPSLWFSGQHFPGGFVLHFLEPLRAATRREIFILSCSCWD

SEQ ID NO: 38000 - protein, 86 aa, Homo sapiens
VILPHLFPQLTPLCLSLTLLSPQPKPGHTLAAGGLGFDHRWVLFHFWFKNLLTWVMSCTQVLLVGKKQLLLHLHPSPMELAFSRPP

SEQ ID NO: 38001 - protein, 25 aa, Homo sapiens
MWRGLCLSLQPEFLVSSSPFCVLCS

SEQ ID NO: 38002 - protein, 67 aa, Homo sapiens
MIPFYCLVPSHKTTCDILLGPIHLAGVTLLFFSFLFFFFFLRWSLTLLPRLECSGMISAHYSLCLLG

SEQ ID NO: 38003 - protein, 32 aa, Homo sapiens
LPCCCTQKRNMYRIVNLILDLPALVIVTHASV

SEQ ID NO: 38004 - protein, 88 aa, Homo sapiens
LAGLLSLAAARAWDRFLLFNVLHLCPPLAPAGDRLLPCDLQVLGRAQTAKMPGHSRRWERGSSLPWMIKATPGAEAGESLELGKQKLQ

SEQ ID NO: 38005 - protein, 46 aa, Homo sapiens
MVLLLAQVVWATLDMGVHRASFTALIMSGSPPAGVCPADPDSTTDE

SEQ ID NO: 38006 - protein, 116 aa, Homo sapiens
VSRSRLTAALNSWAQVILPQCWDYRREPPHPASSSVFLLSIRIRKFWPQQLVLSSVSSCTVVVTGAVLHLAHVAMNKTRSLLSWGLHSSETQMQTQNSRRVLSAIMRNEDRLEDGL

SEQ ID NO: 38007 - protein, 57 aa, Homo sapiens
MGWFWLVHRGCVQSVFMSCVSPFNIQNLILLHFNVNSPLEGEHGMYVTHMFAYQAHI

SEQ ID NO: 38008 - protein, 43 aa, Homo sapiens
LSLHRNLNSRMEFFLLCWDSFAWQGLISPLARGSLCSIFFNLK

SEQ ID NO: 38009 - protein, 62 aa, Homo sapiens
VGAAEEMDINPGSPDSGSQSGFFSHPISPWFHRTLRRLLGCLTLTLSGRILNPSWVSSTGMP

SEQ ID NO: 38010 - protein, 71 aa, Homo sapiens
VVAAVATVVAAEVTAAVSPPGDPAPAPPPATTVGAAEEMDINPGVKSQGMKPAGAGNLGFRASEDREFPAT

SEQ ID NO: 38011 - protein, 111 aa, Homo sapiens
MRGLYRCHRGPGLLKWNPAWSRARPLARGRRRSSKGGAGLKPGSEPALTGAEIRDAAVSTVFYFTMDPSAWGARPGCPSSPGQPDAGTGGTCSGPGPWEGKKGPSRFTCLG

SEQ ID NO: 38012 - protein, 23 aa, Homo sapiens
MAAAAAAAAAGTSVGLRRRSRRF

SEQ ID NO: 38013 - protein, 37 aa, Homo sapiens
MRAWRCLRYGLYLREMLEVEMKTLALNSSWRTTSFQS

SEQ ID NO: 38014 - protein, 39 aa, Homo sapiens
MFSTWSRTEKLLCLCSLGTHWKLYSDIFWDLVWIVQTGA

SEQ ID NO: 38015 - protein, 42 aa, Homo sapiens
TLKIRCLQGVLWFLYFFFSLYQKVFFNGKKNNFLFSFTNEFQ

SEQ ID NO: 38016 - protein, 45 aa, Homo sapiens
MEAAAAAAAGSRCAPSTAAREVGKFAARRPKARGAAPLCRELSPI

SEQ ID NO: 38017 - protein, 55 aa, Homo sapiens
GVFVVARDRRRRELRTGAFSLLLGVVALLPLCGKRIQALPRACGCGGPEVLVVPR

SEQ ID NO: 38018 - protein, 60 aa, Homo sapiens
MCYSLCGGDRDEPGSPLAAAAATPAAAAAPAAARTPSARAHPGFPERDAAAAAPVRPRAP

SEQ ID NO: 38019 - protein, 68 aa, Homo sapiens
MCRGIQTLENVPPEFPASSKETRASMEPPLVAGGLSPRGIHHCRPLGGTNLEMGLVERGIEKSRRAYK

SEQ ID NO: 38020 - protein, 48 aa, Homo sapiens
MPVCCMQAFWLPTLQQNNCTNSLVPIPPTESPGATVFFALHCRRGTKC

SEQ ID NO: 38021 - protein, 66 aa, Homo sapiens
MEITSPDLAFLSLFLFSPLPSDDWRVKGNPERGGEQRFEKMQECVWRRVKLPFKLWPPGTRCSAAG

SEQ ID NO: 38022 - protein, 52 aa, Homo sapiens
MRFLISIICTWRFIQERITGADLNHGAHKWGGCSSGHGKNFLLQLETAFCVG

SEQ ID NO: 38023 - protein, 42 aa, Homo sapiens
MESRTLLLLFSGAVALIQTWADYNYNQGRNDLIFTLQLWKRQ

SEQ ID NO: 38024 - protein, 25 aa, Homo sapiens
MEFCSVLLALLSQRNPRQQMPIRSV

SEQ ID NO: 38025 - protein, 65 aa, Homo sapiens
SPLRCSWGLLAALARRIHPQDLKLPKELLLCQRRVERAVGGVCLSGLYCLVPYYLVHIFPGTLGC

SEQ ID NO: 38026 - protein, 99 aa, Homo sapiens
YWSLVFFHLFSLISFACTLPGCWRLEAVTQQQREATLERPHIATSPSAARPPRAQEARNLWHPSLKGEDGNPAEALLGWGLHDRAGLIKWRPTRGSNPG

SEQ ID NO: 38027 - protein, 103 aa, Homo sapiens
MYCLIPEHGRKAGSLLGMLFSGGQAKLWGTASESLCSQSAADTCRQSPLLQDVPLHGELPEAEKGATDLKAAQRRVLPKAQGDRCLVSAGVYSKPKGSPVSKW

SEQ ID NO: 38028 - protein, 48 aa, Homo sapiens
AREDGGRKPADRRLLHPKARAGAGTLGLAVFSSCSAVGGGGRNQSLGD

SEQ ID NO: 38029 - protein, 21 aa, Homo sapiens
IWNFPVKRPPTTLLLSLCTCV

SEQ ID NO: 38030 - protein, 29 aa, Homo sapiens
MSRAAAATAAAATWGRAAAAAAAAGTRGQ

SEQ ID NO: 38031 - protein, 35 aa, Homo sapiens
RLSAHLLSRQSSARRGCVFVLSAIFVLSNIFVLSH

SEQ ID NO: 38032 - protein, 35 aa, Homo sapiens
MEPAVRMRGAEDQKTQGVNGACHPWSFSRISGLSA

SEQ ID NO: 38033 - protein, 36 aa, Homo sapiens
EVAAVAVAAVAAAAAAGRRAERASGFRGSGEGGCSS

SEQ ID NO: 38034 - protein, 36 aa, Homo sapiens
MELKRLGSVLRWDFFPCSRVQPQVSGPLVWEVVESV

SEQ ID NO: 38035 - protein, 37 aa, Homo sapiens
MCARFRKAAHSRFLGVSAAVGSWGQGPGCWGVGRGSR

SEQ ID NO: 38036 - protein, 39 aa, Homo sapiens [sequence omitted]

SEQ ID NO: 38037 - protein, 40 aa, Homo sapiens
MGHGMRRRPQQAPAAPAPAPGPAAAAAAPALPPPGEALQP

SEQ ID NO: 38038 - protein, 41 aa, Homo sapiens
MSSSWEDGRCLRQWVAESETKSHKPWETESLVFVLGTVPSE

SEQ ID NO: 38039 - protein, 54 aa, Homo sapiens
MYCLIPEHGRKAGSLLGMLFSGGQAKLWGTASESLCSQSAADTCRQSPLLQIIL

SEQ ID NO: 38040 - protein, 68 aa, Homo sapiens
MSPGRNVPPQIMLFISLGGSAARQHQAPGGRCARSPALPSSPCAAAAATPGLGVAPASVPGQGSFHED

SEQ ID NO: 38041 - protein, 76 aa, Homo sapiens
SDAALRAPVVIKGRRRATHVTRIAEGAEVVGFLSLSLSLLALPTQQRRPPARNGLPGASSSSFPKLNCPVSDSDFS

SEQ ID NO: 38042 - protein, 89 aa, Homo sapiens
MTLSTSNLKSFTSYLVSDLSWYPFPTPLDNPSQFLMLIEELWLQGTFQDFTPTQISFFSFCLLCLWDILSPHPQSLTAGPPSSASHTTY

SEQ ID NO: 38043 - protein, 92 aa, Homo sapiens
MLALFHFHLPPWDDAVRRPSVDASPSTLNFPDAELYASIFLCCMAPGEILISFLTLVQIAHANGRGCNTPACGAAACVWHGEFNICCKSHRF

SEQ ID NO: 38044 - protein, 145 aa, Homo sapiens
MEAQSCEQETTARRNGGARSLKGNAAGGVVKDNICFGATSGAVTKKPSTLRKKEKFGYRETPCSKCCDSKTAGFAPLAKEPTETPGAATAKPALEGLGWRKPRTETRKLCTARLAVDTNRKVSRLLSGRKRGSKPATQWREPRSH

SEQ ID NO: 38045 - protein, 9 aa, Homo sapiens
MKLAAFLLL

SEQ ID NO: 38046 - protein, 35 aa, Homo sapiens
GALQSSSLQVLLLNSVLGTSGPGKEPKRSQPASRR

SEQ ID NO: 38047 - protein, 13 aa, Homo sapiens
MTAALTSISTATS

SEQ ID NO: 38048 - protein, 74 aa, Homo sapiens
MRRAPASPPPARAAAPAFPAVVPHSVPAPRGRRLLPLGAVAACAVSAAQPLSPSLRQPRRTAHQEARARMGSLC

SEQ ID NO: 38049 - protein, 15 aa, Homo sapiens
MARFSPKPSDLEPMD

SEQ ID NO: 38050 - protein, 18 aa, Homo sapiens
MARASLWRAGGTLTLTAL

SEQ ID NO: 38051 - protein, 19 aa, Homo sapiens
MLFSDSRYTLVLFSLFLQS

SEQ ID NO: 38052 - protein, 20 aa, Homo sapiens
TVFKLTDIFLCLIHCAVESL

SEQ ID NO: 38053 - protein, 23 aa, Homo sapiens
MRTRRPPGVAAAGVLALCRSEVE

SEQ ID NO: 38054 - protein, 25 aa, Homo sapiens
MLHLWHSATSLALPLRTSEPRPRAQ

SEQ ID NO: 38055 - protein, 26 aa, Homo sapiens
KSPAGQGAPLAAAALALSQCAALQPA

SEQ ID NO: 38056 - protein, 29 aa, Homo sapiens
MLLAAPASSPSSRAACWGFVVARTPRATP

SEQ ID NO: 38057 - protein, 29 aa, Homo sapiens [sequence omitted]

SEQ ID NO: 38058 - protein, 29 aa, Homo sapiens
PVVGLLAALTLNLSVRGEGICRCGFWSCS

SEQ ID NO: 38059 - protein, 29 aa, Homo sapiens
MSGAGMSGCFGWRGSHFQSFFSLVIPALP

SEQ ID NO: 38060 - protein, 30 aa, Homo sapiens
ARAAGSWVFFSAICSRRRLLLLPLLLPLPP

SEQ ID NO: 38061 - protein, 33 aa, Homo sapiens
GVRLKTCWRGVTSLLLSLSSSSAPRFRGCPSAL

SEQ ID NO: 38062 - protein, 34 aa, Homo sapiens
SPHSLFSFLLFLKKIFRILLVGVDDIFTVFTDTK

SEQ ID NO: 38063 - protein, 34 aa, Homo sapiens
STSLPGQVVTLLLPALSASAWKIEALSPSGEVRA

SEQ ID NO: 38064 - protein, 35 aa, Homo sapiens
MFLRPNPGFGMSVRAVEQRVCNMVSLCHPGWNALA

SEQ ID NO: 38065 - protein, 36 aa, Homo sapiens
MDGAWSLGHYLAVVGGGDRAVRGWPAAGACPAGLED

SEQ ID NO: 38066 - protein, 36 aa, Homo sapiens
MRLSAHLLSRQSSARRGCVFVLSAIFVLSNIFVLSH

SEQ ID NO: 38067 - protein, 36 aa, Homo sapiens
EEKHIFSFACIIRVSTPLLSFLATLLQSSTNYPCPG

SEQ ID NO: 38068 - protein, 38 aa, Homo sapiens
MSFTKLSLSAMPALASKMDEWVSPRKSVETTWKSEFQR

SEQ ID NO: 38069 - protein, 39 aa, Homo sapiens
HRGRRAVPCGARGLADPGCCAASATVAAAAAKAGGGLQW

SEQ ID NO: 38070 - protein, 39 aa, Homo sapiens
YKKGNNPFLFLLPSPTQTLLISLLGWPPTIGPGAETRSF

SEQ ID NO: 38071 - protein, 40 aa, Homo sapiens
MQSAQRSGERGTPRTGPGSSSFAAAATTAATAARGGSSRA

SEQ ID NO: 38072 - protein, 42 aa, Homo sapiens
MSRRTSIRRNEENESFKLQSRSVLFRHKIISLILSPFAFASR

SEQ ID NO: 38073 - protein, 45 aa, Homo sapiens
MTVSLFLLLATSQSQDGCCDSGSCPNSRQQEGHGAAPASSCLPIP

SEQ ID NO: 38074 - protein, 45 aa, Homo sapiens
LSDSTKAFFPCYLCRYFIFLAFLEITTSCGSVSGNFTDLSPPSHK

SEQ ID NO: 38075 - protein, 46 aa, Homo sapiens
MRSSSPRSDRRLSPSSSLLPASHPPLACPSASFAAPPPLGRRAHSD

SEQ ID NO: 38076 - protein, 47 aa, Homo sapiens
MHLLLLPVIFLPWVLPQHKHTSATPGFSSEKQFMSETENQTANVKFY

SEQ ID NO: 38077 - protein, 50 aa, Homo sapiens
MDTVSTWGLRYVAAALSFISTSQTFDLPTLSSLLMKLKLLCDAYCPRSFC

SEQ ID NO: 38078 - protein, 17 aa, Homo sapiens
FCLFSRELRPLVLVIFV

SEQ ID NO: 38079 - protein, 53 aa, Homo sapiens
MSLPRGRPGSLSSLWPLPSARADEVRVALGRSAWHAQRRRAGGLGCHRVREEI

SEQ ID NO: 38080 - protein, 55 aa, Homo sapiens
MGTRARPGSRCRRTAPSLALCARSHPVTLPAPRALPPELLLLLWLLSPPPRVARC

SEQ ID NO: 38081 - protein, 17 aa, Homo sapiens
MRRAWRPRLLGAALVAH

SEQ ID NO: 38082 - protein, 57 aa, Homo sapiens
GDKHSAAVAAAALLRVLSLCRRCPAHWPPPSLVERGCQRGSLSPAPRGPQRAPQRAP

SEQ ID NO: 38083 - protein, 58 aa, Homo sapiens
MFYWQRLGLALLASVLGFFLCTAGLALLTSPGVIEHPCACCHPLPVCRIPDSVSGDRN

SEQ ID NO: 38084 - protein, 58 aa, Homo sapiens [sequence omitted]

SEQ ID NO: 38085 - protein, 60 aa, Homo sapiens
ASALACHRYRSDWASGLYILAALSTSSSIGSSGGRGNWQQVGNYVKESPDVIISGCHRNI

SEQ ID NO: 38086 - protein, 61 aa, Homo sapiens
MFKIQPKIVLCCCMSHTVVRSCEIATCAKRNVSVTCPRNTAEAEREDVLIYHYRYMKALFI

SEQ ID NO: 38087 - protein, 62 aa, Homo sapiens
EQPDQVPLAVLPGSLILALVYFQNQGSGPYGIAQVAAQAQYLRTGPSPFPLWDLSSGPSLLR

SEQ ID NO: 38088 - protein, 64 aa, Homo sapiens
MAAWDRSQPLRPLPEEPRPVCYTQLIGSSITERKGNMRMTSVTNMAFWTGSIVCLASTQGMLMV

SEQ ID NO: 38089 - protein, 65 aa, Homo sapiens
MATVGHLDHLEWPLPRCWLQPGGSAHAVSFTEPEGAGTSRSPAPSKLAGGSSPGIAAAAQVMAAG

SEQ ID NO: 38090 - protein, 66 aa, Homo sapiens
IHFSLPPPTPSPLHPISLFRWLLGGEQFCGFFSPIILTRSGLRVSPASAHCVHLALPCFPQPVARL

SEQ ID NO: 38091 - protein, 68 aa, Homo sapiens
GGTGQAGQGRGGAAGVSVAWISLGAAAGSFSVCISASPRVPSPGSPPLSRGFGALGSHSLVLLHLPLT

SEQ ID NO: 38092 - protein, 69 aa, Homo sapiens
MRCTATSGSAPVWQGPGFWVQPAGVRLRQFCRALGQGVMIAWLTAGLVSVCCCTLWRFSLELLPEKAPL

SEQ ID NO: 38093 - protein, 70 aa, Homo sapiens
GSPLSVITPTLATPSRHRGRGWTLASFPNSTKRDRPRTSFPGHLALQLPEVSITVGAISLLCSQLLVWRA

SEQ ID NO: 38094 - protein, 71 aa, Homo sapiens
MFAPRRPLAAAAAAATAATGAAAHYAKRRQMRAGPAGRASASPPSGSPRRRLTLPGDSLGPDLGPRRAGMA

SEQ ID NO: 38095 - protein, 71 aa, Homo sapiens
MRFSTRGRPWLPSSGICKMATSSEIMGRGMARGQRSRPSSINLSIWAQNRHFWIFPSFPTPRMRLSKDVLN

SEQ ID NO: 38096 - protein, 74 aa, Homo sapiens
AALRAPVVIKGRRRATHVTRIAEGAEVVGFLSLSLSLLALPTQQRRPPARNGLPGASSSSFPKLNCPVSDSDFS

SEQ ID NO: 38097 - protein, 75 aa, Homo sapiens
RPQALPPPCEARSPGVRRHGACSAIIFFTLELLLLLLLLLLGLSLISERASKRARGEKGRECPPSTLRSWARSHS

SEQ ID NO: 38098 - protein, 76 aa, Homo sapiens
LRQTEALEIKRKYRRTNSLPSPGAGRGHSGDLGLLSQDCESGLGFSSLHSTAALVIATCLLITEESQVLRRGRNTH

SEQ ID NO: 38099 - protein, 81 aa, Homo sapiens
PRLPRSRAAASPNLSLLLALACERELARTRKQLEVTPGRLRLSGPSRADRWALCRGKAGVPGSLSQSRACFCAGPVEDSGQ

SEQ ID NO: 38100 - protein, 86 aa, Homo sapiens
RFKKRACKQRCCSTPLRPRAAARRTATVAAAARAAPKAGVAATGTSVPAALLLAAHAVGSGTRRLALQTPAELQKPTERRPARHGP

SEQ ID NO: 38101 - protein, 92 aa, Homo sapiens
MKQRLRGQQGFQLDVCVACTLLFLLLTVNSGVTSREQLGCSRPSPAQGEGRGTCSSEQPEGGGRSEVVEVVCVSYWSEGTKCVCCLFCILFF

SEQ ID NO: 38102 - protein, 95 aa, Homo sapiens
MSHSYKKAISDEALRPFQMDYFGGLPPGQYATRMTGQVHGSGCHLRSAPCDLGASQRKLSSNFSEIDAGLFSQGKSAAYTDIGATKPVEQRETAS

SEQ ID NO: 38103 - protein, 97 aa, Homo sapiens
LGSCGRGHREALGCAWLLLVGALSRRPAWGGGGVDSSPASPWRGGLHSLLRPPPLGPQRLGPASCFPACRRSRWLEEVFTSQESQSVSGPRWEKNWL

SEQ ID NO: 38104 - protein, 98 aa, Homo sapiens
MLLTFSSSSRHRRLYRRRRHHLLFVVLLPPPPGSVVLCSGGEKCYVRKVPGGTTWSHAPWALPRAPARCPSLEAKGLLWKMELIVHFPECISKPINGT

SEQ ID NO: 38105 - protein, 100 aa, Homo sapiens
MADEQRAGFSPCGSLSLTVLGGCFLSCCPWESDSRFFSLWPLGLSGLGGLTRSTRWASLVWGPGTWRSPAASVRPVLGVALKRQPVPQSPWDYRSVEEML

SEQ ID NO: 38106 - protein, 106 aa, Homo sapiens [sequence omitted]

SEQ ID NO: 38107 - protein, 108 aa, Homo sapiens
MGRSALDRTTAQPEASGTPAAAQSPPGPWRPSGTGRCLLCSNPSGAPCPLSLPRRALPCEDYTRCFSSLPEDTASLGPLPCAKTPMTSVPNAVPSAVLWGAALSDFPG

SEQ ID NO: 38108 - protein, 109 aa, Homo sapiens
GAHGPPGARGRERAQPGRPGTFFLALLLSFSPRASPARPSARPLFLCGGDRIPRGTRGHQAGPAGCAAKARSPRPRAPPPPAAGLRETSGRASAARARGEPSRPPCPRP

SEQ ID NO: 38109 - protein, 117 aa, Homo sapiens
LGRASASALGLPAACSGSSGRGLAWPGAHPGGCSPCLTCGGVTGPGPAPVHLRGLHPPAAGCPALCAEALPCPAGRRAGLGLAAASGDGGCGLPPSSARLRWGPPPGLPAGTGIHGP

SEQ ID NO: 38110 - protein, 139 aa, Homo sapiens
MPRWLLLSLTSAMPRWLLLSLTFAGLFPLRRRQLLGSCGGREGGGPDQPAGSPAPLRPPLPRTLRLRKYRGNPLPPEVRGSLPEGAPWSRAPLGGHLEARCGPRTREERAAGAAATAGGGAGSPGAAEGRPVLHMLPLG

SEQ ID NO: 38111 - protein, 149 aa, Homo sapiens
KQLSVLDQSLNFSFYCFLAAAAGTVAAGSGSAGLRVGLRGRCSSPALGCPTARRRTTHGARATGTSKAPSVGRGEGGGGTAEANERTPRRRVPVSPRCNAFQQKPPRPGLQQPDGCQGHTAATGAAVAVAVPHGLRTPRVANEVIEKKQ

SEQ ID NO: 38112 - protein, 15 aa, Homo sapiens
MRSPRSSSLFGVSGD

SEQ ID NO: 38113 - protein, 38 aa, Homo sapiens
MMWRTWMLSCFSSNGLRSRWPPSDLSDCVGAGPLVSNS

SEQ ID NO: 38114 - protein, 81 aa, Homo sapiens
EVRRRRGLELRRGLGRRAAAGGGGHVATAVAARAAAATAAAASARAAGRPPTLPPRGSPSSLHLAPLVPLARPGAALCFSL

SEQ ID NO: 38115 - protein, 14 aa, Homo sapiens
MAAGALCVVLLLGR

SEQ ID NO: 38116 - protein, 39 aa, Homo sapiens
RKVARWCWKALWCVWTTVSICGMETSYPPGCRPSRMLST

SEQ ID NO: 38117 - protein, 20 aa, Homo sapiens
LLYLIHKILVCIFLNTVHVP

SEQ ID NO: 38118 - protein, 28 aa, Homo sapiens
LGFCLVLSLQKVLPVPPALGTRLCIASP

SEQ ID NO: 38119 - protein, 36 aa, Homo sapiens
LDELASFLFSAMEFCSVLLALLSQRNPRQQMPIRSV

SEQ ID NO: 38120 - protein, 40 aa, Homo sapiens
MRFTARSASSSRRTSKQAAWPGAGSCSASASAASHPQRGS

SEQ ID NO: 38121 - protein, 31 aa, Homo sapiens
MVLLMVTLLSVTAEEKWTATGSGSQGTGPVI

SEQ ID NO: 38122 - protein, 23 aa, Homo sapiens
LRLRLRLRRLRFPMGLACGAWAL

SEQ ID NO: 38123 - protein, 23 aa, Homo sapiens
VRRRSRWWDLTVGPISLFSALLA

SEQ ID NO: 38124 - protein, 29 aa, Homo sapiens
MAPFILFGRMNRSCLAFSSSSPPLLCSES

SEQ ID NO: 38125 - protein, 9 aa, Homo sapiens
RPLVLVIFV

SEQ ID NO: 38126 - protein, 7 aa, Homo sapiens
LVLVIFV

SEQ ID NO: 38127 - protein, 98 aa, Homo sapiens
KISTSLHFSFLWGAALVLFGPCLLGMEQSIEQTTEILLCLSPVEVASLKEGINFFRNKSTGKDYVLYKNKSRLRACKNMCKHQGGLFIKDIEDLAGSC

SEQ ID NO: 38128 - protein, 58 aa, Homo sapiens
LPSSLPPSLPLSCLSPAPAPGALPAPAPLPSPPLWTGWAGLGPAGRQHRGWGRQIRGS

SEQ ID NO: 38129 - protein, 20 aa, Homo sapiens
MSSMNMHRYLSSMEKITYKI

SEQ ID NO: 38130 - protein, 56 aa, Homo sapiens
LSDLSPPLLPLSSPPSSLLSSFLSPLSPFALLSSLSILFFLCLSSNQSVAVKDTSH

SEQ ID NO: 38131 - protein, 43 aa, Homo sapiens
LPSPTPSHPQLNLIIIPILFLTLHQLNPNSMPYPSPNPNPTHL

SEQ ID NO: 38132 - protein, 62 aa, Homo sapiens [sequence omitted]

SEQ ID NO: 38133 - protein, 12 aa, Homo sapiens
LLWFFLGVMKFH

SEQ ID NO: 38134 - protein, 34 aa, Homo sapiens
LCSLTGSVCVMCVGCVCVGVFVCVSTPVCVCVTP

SEQ ID NO: 38135 - protein, 44 aa, Homo sapiens
LPALPSPKMAARSPARASQATLPHCARALFSFPFLDQGAAIRSL

SEQ ID NO: 38136 - protein, 56 aa, Homo sapiens
MSASRNLRTLKGRTAPGSTLPLRRRPPPHSRCLMSTFSRWLRSPCQCLPRSLHTQT

SEQ ID NO: 38137 - protein, 160 aa, Homo sapiens
LRSPGHGSVASTPLCPRPVSALTTPALSAPTFFLQPRPPPPLLAAAMDSPPVPRSERAADPEWPHMRIDPQEGGGVKAIGPLGRRSMRLGPRRRAACGRVAFGSSTFALVPVFAHLSILQSLVPAAGAASPVAISAQHLCYSHVTPGDPGAGAGQGPAPS

SEQ ID NO: 38138 - protein, 101 aa, Homo sapiens
MEARKAVGPKGNILEEGAWLEENVPGIEFFLEAKYSEVDGRGLRSSTFALVPVFAHLSILQSLVPAAGAASPVAISAQHLCYSHVTPGDPGAGAGQGPAPS

SEQ ID NO: 38139 - protein, 64 aa, Homo sapiens
LLEGQGCGFWGLVFSSGAFIPLPLPSFQTPLGRVQWLMLVIPALWEAKAGGSFEARRSIPAWAT

SEQ ID NO: 38140 - protein, 22 aa, Homo sapiens
LSLLITSLAYFWISFPPFSSKS

SEQ ID NO: 38141 - protein, 68 aa, Homo sapiens
LSALEPPWAAARRRLGCHPGHGRDKRSPFTALLHLFLLVHLSLFSVLYSTHAHLCPLDLPSPCYYLHP

SEQ ID NO: 38142 - protein, 83 aa, Homo sapiens
MPIQHPSRHSAVSCLGVAAAMARKALPPTHLGQSWFCSCCRDTELAISALRARTATGSPGSCRCTAGPLPCASALESCCCRVT

SEQ ID NO: 38143 - protein, 54 aa, Homo sapiens
LSASRSLPCSVPSSSLFPGPVSRCPCLLSFSSASFLLTLFLTALPSAFFTPLSF

SEQ ID NO: 38144 - protein, 27 aa, Homo sapiens
MGLLLFFAVTKNVTVAACMHAIFTTDV

SEQ ID NO: 38145 - protein, 54 aa, Homo sapiens
MAWTESCTAACAFPSCLVLLYRGRGVPTDLQVPAPLFSTQSKLKRPGFPKTHVT

SEQ ID NO: 38146 - protein, 88 aa, Homo sapiens
LVSVEFPVSPKGSVTTLVRYMLIILLEPAVQGVGVSPGKSILQVLNLISANMLTKLLLIPHYSSHTCSCTFFFSMIFMPLLRELTKLN

SEQ ID NO: 38147 - protein, 53 aa, Homo sapiens
LDLIPTAPETLFHLLMCWVWLGLEPGAICLPGGSQGRVPRGMAVREPLGTRRP

SEQ ID NO: 38148 - protein, 88 aa, Homo sapiens
VSKPRIMQPPAFEFLVSLALVSTCMMGFSGPGFDQRTLCHHRFFLSLSYLGELMTPGPCSTRMSPRSCQLGSASMNASNFVEARVPCS

SEQ ID NO: 38149 - protein, 87 aa, Homo sapiens
VSKPRIMPPAFEFLVSLALVSTCMMGFSGPGFDQRTLCHHRFFLSLSYLGELMTPGPCSTRMSPRSCQLGSASMNASNFVEARVPCS

SEQ ID NO: 38150 - protein, 139 aa, Homo sapiens
LPLQEAAAGLLPALPPARLLSACPAPTHHALQPLLPQLLPFSLPGMGGAGLRLGLVLSPVPGPRPVTVCLSLSFPEGAMELRMPASGLSQVLERKKPCLPSATGLAMAGDRLGDLLSLWPTSAPSPSSRELVGRREGGR

SEQ ID NO: 38151 - protein, 36 aa, Homo sapiens
MCRARRGWSPPLLPPPARPAFDPMGHRQGRVIAARP

SEQ ID NO: 38152 - protein, 118 aa, Homo sapiens
MRYPEGARSSTFPVPSQTQRSPFLEILIEVPALPVLMPDQQDASPGGHPGYQDWERMPSGDSCIVLGGVLGPGSGVGGSVSGRGWKLEGSIFSDRTSWPCTWTVTWGGAPTIRSPTRE

SEQ ID NO: 38153 - protein, 58 aa, Homo sapiens
MPMLLWRLSWKVTRSCPPAREQKKMLLVHLTKKSRAACDFSLALQSPGALSTFCQVPL

SEQ ID NO: 38154 - protein, 131 aa, Homo sapiens
LPSLSISSSPFPFSPPPPLPASSPHPSWRAGCAEARELAGEGRMEGPGLPAPLVGVLLAGACVFSAAGRVPAEPRGDSRLWQRALGALLSPPLKGWGQPFPDLNFFCSLFLTLHLRVCSEVVVGGERRRSV

SEQ ID NO: 38155 - protein, 29 aa, Homo sapiens
LRQWKTINFTSLAYNLVVIETALLFLSLF

SEQ ID NO: 38156 - protein, 29 aa, Homo sapiens
MNAGYLCVWYLLCPFLFKDPEQNKDTLSI

SEQ ID NO: 38157 - protein, 72 aa, Homo sapiens
LPTKTIRVKKSPLHPRTRKPPGWHKRPNSWEPSTVQGAWGRRPEAGDTEESGGYYGSGNVECNVSSSAHLCY

SEQ ID NO: 38158 - protein, 83 aa, Homo sapiens
VCFLYCCISLIILTCLKEHLISIRFAFCCFLSLVIQLSSWASSLLSQVAENAFYCIQSHCFARQWFSSELLPSGLWPQSSDRQ

SEQ ID NO: 38159 - protein, 68 aa, Homo sapiens [sequence omitted]

SEQ ID NO: 38160 - protein, 65 aa, Homo sapiens [sequence omitted]

SEQ ID NO: 38161 - protein, 24 aa, Homo sapiens
VIWAFICVRSRFILFLTVFSSTSG

SEQ ID NO: 38162 - protein, 27 aa, Homo sapiens
MLFLVSLGIVLAVERKASVTSRNSPII

SEQ ID NO: 38163 - protein, 38 aa, Homo sapiens
MVRSHEKNANTLRWPHIFTLALVFGVIFCYPVLKLFFS

SEQ ID NO: 38164 - protein, 102 aa, Homo sapiens
LVFFPGFLSLAQEGTVGRVRSWSSVLHLFTCLTAGLCALESQTWGSAWYPELWSLCPTTHPTPSVSSISPRTTGCPLVSGPKVPAFSSALPSLPIYFLHFLS

SEQ ID NO: 38165 - protein, 71 aa, Homo sapiens
LGLLVPLASFSCAPPTPSGGHRPRRVAGRGSRLVPGACKWFCFARLVCAVVWFDLFVHPVKNNGACVTSIE

SEQ ID NO: 38166 - protein, 42 aa, Homo sapiens
LAASEPKAESGRQRSPRRRPLEDSASSERWGLVMLTRLVLNT

SEQ ID NO: 38167 - protein, 49 aa, Homo sapiens
LQYSRPMGDLGLFFLWEPSGEQTWLFMCLVGEVTCMVGTRLSWQPWDRV

SEQ ID NO: 38168 - protein, 19 aa, Homo sapiens
LTCMIMEMVYLMLKMSLVF

SEQ ID NO: 38169 - protein, 45 aa, Homo sapiens
MQPLQRHMFEIPGHWRSSRLLYSPQIKNEKRIHNLVIASSESSEL

SEQ ID NO: 38170 - protein, 7 aa, Homo sapiens
MYWIILL

SEQ ID NO: 38171 - protein, 56 aa, Homo sapiens
LSSWMRFLISIICTWRFIQERITGADLNHGAHKWGGCSSGHGKNFLLQLETAFCVG

SEQ ID NO: 38172 - protein, 45 aa, Homo sapiens
LEKKKCEGSTPTYVVICESCTAWLFLNWCFSPAFGGFFIIIQKHN

SEQ ID NO: 38173 - protein, 80 aa, Homo sapiens
LRWRRWRRDTHTHTHSELRGRRKGSHKLQGKEKPSTGITFIPDAPNIISLQGKRVFIALRLKMYSRFSPFSLLLCIFWMW

SEQ ID NO: 38174 - protein, 80 aa, Homo sapiens
LKRQIPVPPTRERRLRQRGEWAGGSHKLQGKEKPSTGITFIPDAPNIISLQGKRVFIALRLKMYSRFSPFSLLLCIFWMW

SEQ ID NO: 38175 - protein, 68 aa, Homo sapiens
LKKKWNEGANLWSHKLQGKEKPSTGITFIPDAPNIISLQGKRVFIALRLKMYSRFSPFSLLLCIFWMW

SEQ ID NO: 38176 - protein, 70 aa, Homo sapiens
LQTLKISVSELWAWSHKLQGKEKPSTGITFIPDAPNIISLQGKRVFIALRLKMYSRFSPFSLLLCIFWMW

SEQ ID NO: 38177 - protein, 30 aa, Homo sapiens
VPSSFLPISSCCLVSVLEGKGIKGDINQNS

SEQ ID NO: 38178 - protein, 27 aa, Homo sapiens
MLHGTASASPALLQAEGYRPAQPAPAL

SEQ ID NO: 38179 - protein, 87 aa, Homo sapiens
LEFLAGVLTSGYFCPAAAARLPFCLFCVTSGQVLVQSVAKDAEREAGLPRHPSAKCMCVCKPSLAVGRPRGPVQAAAESRARERPRE

SEQ ID NO: 38180 - protein, 51 aa, Homo sapiens
LQKTFLSHIFLLLISQQLKFQLMDSILPVKTSSPENCASWHPAVPKYYLTH

SEQ ID NO: 38181 - protein, 30 aa, Homo sapiens
IFFFFCIIVSSLPTAELGTENACSTCLLNE

SEQ ID NO: 38182 - protein, 8 aa, Homo sapiens
LLIVLLFA

SEQ ID NO: 38183 - protein, 73 aa, Homo sapiens
MSRTPEFGTSSPTTLRRLSCRAALCTLSWISQTPIPSQLSPAVRCCHRARTSKMCSPGTSTAASSATWSMSSS

SEQ ID NO: 38184 - protein, 93 aa, Homo sapiens
MPPGFQLLPSKFKAWEMWPSRTKIIPCGDRAKMNPEGSLGGRLDLPTSEGRDFPLRRSLRRYAWKDFNARITALGPLVRISSDLRMLHRKEDI

SEQ ID NO: 38185 - protein, 24 aa, Homo sapiens
LLLLSFLISDWPPPTGSAEHKYSG

SEQ ID NO: 38186 - protein, 8 aa, Homo sapiens
KLAAFLLL

SEQ ID NO: 38187 - protein, 76 aa, Homo sapiens
LCKQSLVYSCLHQSTVRFMKKNKLRTTLYVHLQMPQLMLVGCLSAFCDNEHMDFCLLNSVDPFSQLPGAWIFTSNC

SEQ ID NO: 38188 - protein, 56 aa, Homo sapiens
MKHLNEGLITLNSAFVKYAFLLSSFILQYVCRSVDSDLNQIYFTLSLICRYVQTTS

SEQ ID NO: 38189 - protein, 27 aa, Homo sapiens
MVNPGSWCLELFFPLLLTKEHSLPLPS

SEQ ID NO: 38190 - protein, 34 aa, Homo sapiens
VDHLHGVFACVFWSIFCSVVLQKTVFCLRVHSHR

SEQ ID NO: 38191 - protein, 33 aa, Homo sapiens
INPGTLRRLLGCLTLTLSGRILNPSWVSSTGMP

SEQ ID NO: 38192 - protein, 93 aa, Homo sapiens
TAAAAGPMAPTTRRAVSFGLMAPAPSGVAAGLGVARWSAHLPAVGWVKCVASCHPASTAASPSAQLSARRGVTPITSLWMGTDSISKAPASTC

SEQ ID NO: 38193 - protein, 93 aa, Homo sapiens; identical to SEQ ID NO: 38192

SEQ ID NO: 38194 - protein, 73 aa, Homo sapiens
TPSPAETALSELGCFGFSLRASPTYLPASSRPRPSMRSRSWFAPFFLPQMALAPCPLSWTGCDPPGDAPFRGA

SEQ ID NO: 38195 - protein, 10 aa, Homo sapiens
KVRFPWILAL

SEQ ID NO: 38196 - protein, 22 aa, Homo sapiens
VLAGSWSSVFTPIQLLTLAFVP

SEQ ID NO: 38197 - protein, 148 aa, Homo sapiens
MSTCPQRICPRAGTGAMWMVSTMPASPGTSTSPNTAAPAGPTPAPALWRIGSTSRGRERGPPPSCPCRTSSTAVTLAPVKGVMTCPCGTTPTSTASLTRPATTTRPRTRSVTSLTNVGHAMNSKSATPSGTTPSGGWETTAPSLGGRR

SEQ ID NO: 38198 - protein, 41 aa, Homo sapiens
MLTFFFSFFIFTNFLFCPHPSIPRGLSEFKIGFSWKSPVHR

SEQ ID NO: 38199 - protein, 20 aa, Homo sapiens
VLFRHKIISLILSPFAFASR

SEQ ID NO: 38200 - protein, 11 aa, Homo sapiens
LSYFQKLLLVL

SEQ ID NO: 38201 - protein, 31 aa, Homo sapiens
MARGPTSLSAAIWGTVLEAGIQGQIRHRSCS

SEQ ID NO: 38202 - protein, 93 aa, Homo sapiens
MRPWYQAWLRRSSLLRSSSSSSSFFSFSGVLSMMCLSLENCNTESTMSSPCPGHTRPCQLEVTACFTNPTSYATACIQGDVATGLSSDQGAEM

SEQ ID NO: 38203 - protein, 51 aa, Homo sapiens
MSLKVWSRKPWGSLGPFQRFHELKSIFITMLSLYFLFHSRGYIMSDDIIAL

SEQ ID NO: 38204 - protein, 50 aa, Homo sapiens [sequence omitted]

SEQ ID NO: 38205 - protein, 23 aa, Homo sapiens
MNSFRTYCLGNLKPAGLDRQEEQ

SEQ ID NO: 38206 - protein, 89 aa, Homo sapiens
MHLLTSCKSGTFSAPLLLCCRREKLGMCSSGVPSPPASHCPCLPKTSSLSLLCPPPPPSAFALLSSFSPEVRAASSPLVLFLPSLCSLL

SEQ ID NO: 38207 - protein, 74 aa, Homo sapiens
MFPGAMFAGFYEAENIGSVFLRNLRFRIPGPEGQEVLCKQIKCTFRKMKSCNRKIFQNFSATDFTHNSEGRKNR

SEQ ID NO: 38208 - protein, 31 aa, Homo sapiens
MGSSTWGPCAGSWLCASCWPGSSATSASGRG

SEQ ID NO: 38209 - protein, 41 aa, Homo sapiens
MKQPLAFPRPVILLVTRNPKFLSPALPVSSVRVLVPSAELL

SEQ ID NO: 38210 - protein, 93 aa, Homo sapiens
LPQSRPAVAADSARDVCALLWARASLFCARVKRFVPAIPWAALGKLAAWPLVWLSGLVPATVYTDWLGEETRTRKSGTKTRSLRTPQRLGLRL

SEQ ID NO: 38211 - protein, 224 aa, Homo sapiens
MLTVILFCKLLALLFSCSSVSEAGGFQDAPWIINFDDAESARGDRSRPVPQSPRSPPSPQACAWGELSPGLRLAGSGTLAVAPPLGPGLEAAANLFLPYLGDLVAAAASPSLDPAGRGSPGPTPPTQTKTAPSRRDSAPSGGGGKRGGNMAPPKCARRPLGCGGRGRRSRGGRQVHVLGDRSVAVGRDLPSPDGSYFQDIFIFYPLFCVHFITSVYRGNNAKLF

SEQ ID NO: 38212 - protein, 57 aa, Homo sapiens
MFIYKDLACSCVCGAALVSQLSITLARVSPCGFLLLRLPGWSRPHRRARGPARSCVQ

SEQ ID NO: 38213 - protein, 19 aa, Homo sapiens
LVMLLLLLLPPPPPLLLIL

SEQ ID NO: 38214 - protein, 11 aa, Homo sapiens
KKIKMISIMWI

SEQ ID NO: 38215 - protein, 64 aa, Homo sapiens
IHYSRLDRLLWLSLLAWCICYGKRDYNLVLFVEMTTLIKSTHCWSQHTWKVLQGLSYRKPRDRK

SEQ ID NO: 38216 - protein, 27 aa, Homo sapiens
VKYWFCFLYSFCTLGSHLCVGVYHVTL

SEQ ID NO: 38217 - protein, 16 aa, Homo sapiens
IPLVQFSMFLCVLHLL

SEQ ID NO: 38218 - protein, 28 aa, Homo sapiens
TIFALFVTFYSNHLFFCGNWHCPNFYPL

SEQ ID NO: 38219 - protein, 58 aa, Homo sapiens
VCMWVQPWEHCGSASQEPWRSRSLKTQWWHWWAPMPPCAAPSPLSLASAWHSSTSSGS

SEQ ID NO: 38220 - protein, 31 aa, Homo sapiens
VGRFWALWLGFCNFSLGTAVEPHPLWIIIAT

SEQ ID NO: 38221 - protein, 81 aa, Homo sapiens
LREQARPGSLAAAWLQHARPPGAAAAAAPLAARRALLLFSLVLAAVLRLCGARHSEHLPLHDASPRHSDPGQRENNRCSGL

SEQ ID NO: 38222 - protein, 48 aa, Homo sapiens
MQKWFNFRKSLNIAFSRSEEISISKYFHDLVIFKLLIILDFILRLIAI

SEQ ID NO: 38223 - protein, 41 aa, Homo sapiens
MSAVAKISSTSTTCSGLPPSSTLLACSWASSLPLSLEALRT

SEQ ID NO: 38224 - protein, 41 aa, Homo sapiens
MCHQYLLYILQALLSYFTSFTCLTWLDANTLDEFERTMLPF

SEQ ID NO: 38225 - protein, 29 aa, Homo sapiens
ILNAISSLLALGHFLLDPALLSAIVKDQP

SEQ ID NO: 38226 - protein, 91 aa, Homo sapiens
TGGALLLVPLSQSSPSPEVTAHPEWKSRRPTTQPPGRPWWHRTTSTTSRGPRTGCLRCRRSNKPAWRIFQEEDISITLNLLLKKLYKNKLR

SEQ ID NO: 38227 - protein, 30 aa, Homo sapiens
LLGVLPVSLLTVFGVASRIQRRPIVTPRSS

SEQ ID NO: 38228 - protein, 37 aa, Homo sapiens
LSGAQRFGRLIDHGARVLLVAAAAAAGARLCDHARTL

SEQ ID NO: 38229 - protein, 77 aa, Homo sapiens
LFETVMTFLLISLLVSFSGRAGCLEFSVKETQDSPLFLCLWESPWHTPKRGPCSVSQGSFCIFGLASYICHVVSSSA

SEQ ID NO: 38230 - protein, 72 aa, Homo sapiens
LFCFSFWLFILVATIRKSNTNSNCFLLFTFASLLVELWQVLISNTEHDLPPANVEPGIAASPDSSFIHSDSP

SEQ ID NO: 38231 - protein, 38 aa, Homo sapiens
LGPGLLLSLPSIGAQHPLPAHPSDSNSSPAPRPCVHFS

SEQ ID NO: 38232 - protein, 39 aa, Homo sapiens
MRLTACGSWSCVRSVRSLSPRKPWRSTASLSTSRLMDLA

SEQ ID NO: 38233 - protein, 21 aa, Homo sapiens
VNVKCKILVMCFLFLFSCELN

SEQ ID NO: 38234 - protein, 36 aa, Homo sapiens
LPPSPTLGAYLLLWACPASLCTQCLARATGQCWGCH

SEQ ID NO: 38235 - protein, 51 aa, Homo sapiens
MSSAVGKKVLCCSALISAGMPTTVTTARMPVSCASLHDPARSADHLFFWEL

SEQ ID NO: 38236 - protein, 80 aa, Homo sapiens
MILGFPASRTAFSIFCSLPPVRSLKMKANTTQRLRCQYVLQAALLLGPSYSPASAFQEAETTRTQDCTWLANTIANKKIL

SEQ ID NO: 38237 - protein, 84 aa, Homo sapiens
LDTAGASCLPALALAFPKCTASSAASAASACSPRSWMKWRRDIRSPWLSSTRSCRASERQPSLLLGRLSLSRASSPTQALSSFH

SEQ ID NO: 38238 - protein, 23 aa, Homo sapiens
MGAASQMPLTASSVPTSSTALPI

SEQ ID NO: 38239 - protein, 19 aa, Homo sapiens
IMTFGFVLSSSLLLSQGRS

SEQ ID NO: 38240 - protein, 27 aa, Homo sapiens
VFLTWGLRLVSACICLILAVAFLDLRM

SEQ ID NO: 38241 - protein, 26 aa, Homo sapiens
MFIILSYSVITLPWHYNVSSTEVLCS

SEQ ID NO: 38242 - protein, 43 aa, Homo sapiens
ILPNEPHQLLQFLIFPHQPLYLMPKPFIIAGLGLLRGRHRSPG

SEQ ID NO: 38243 - protein, 38 aa, Homo sapiens
VVSSSALFLLYFIHNSQRCWTRMGRPPVAMSPPRCSWG

SEQ ID NO: 38244 - protein, 31 aa, Homo sapiens
MRWDVKPLLITTLLASIAFVLVSNCMVSVDL

SEQ ID NO: 38245 - protein, 24 aa, Homo sapiens
KLSSMTFLLFAFGLASFIFLIHRG

SEQ ID NO: 38246 - protein, 77 aa, Homo sapiens [sequence omitted]

SEQ ID NO: 38247 - protein, 24 aa, Homo sapiens
MLVSCLCAALQMWRAGAWELWGRR

SEQ ID NO: 38248 - protein, 15 aa, Homo sapiens
LRFFFRVFIFYYFSR

SEQ ID NO: 38249 - protein, 42 aa, Homo sapiens
LFGQKSKPHLATLAWLQLGTQYLGLQAILSQGPLEILFLMVL

SEQ ID NO: 38250 - protein, 34 aa, Homo sapiens
METPRPPLVLHLLGFPPPLPVPSPSLVQCFRHSG

SEQ ID NO: 38251 - protein, 61 aa, Homo sapiens
LAPFIICYQLYFCDKILMLYFTLLSLNHSQNYLNVDYNFGLLGKKNKNLIFISKCIEATKY

SEQ ID NO: 38252 - protein, 63 aa, Homo sapiens
LCLPRGRLHKPSCAGLGLPACLPAWPGPSSSLPLPLATASHPGLASLLPALGPRLCPPSPQGR

SEQ ID NO: 38253 - protein, 28 aa, Homo sapiens
LDTRARPPITELHSFLILLLILAPNKTG

SEQ ID NO: 38254 - protein, 54 aa, Homo sapiens
MGLSLPALPLGPPLPPAGLSLPQALGIIISPQKRHKNRFWIKEVFLSEMKTVFL

SEQ ID NO: 38255 - protein, 70 aa, Homo sapiens
LAFLLLGWPTDLGNLPWLWVTCSLSPRTMEAPCRNMVLTLWGLYPKLKGLEKPLKSRDHNPPPSKDKTSH

SEQ ID NO: 38256 - protein, 26 aa, Homo sapiens
LDVWPVSLGKLLLIIFTVDNIGENSP

SEQ ID NO: 38257 - protein, 37 aa, Homo sapiens
LSHHAVLMKGIISSSLGMVGGGVNILELPYPNSMTWG

SEQ ID NO: 38258 - protein, 47 aa, Homo sapiens
LWLLGFLLFLKMFSSFLSDSFEVLDNQELRSHRPWSPIFACSLALRY

SEQ ID NO: 38259 - protein, 59 aa, Homo sapiens
LERWAIFLICGLAGLFPLGFLRPALHLISLSRGPSMVIGPPSVSWMIIVLFLSQGCHWR

SEQ ID NO: 38260 - protein, 86 aa, Homo sapiens
MCWRKKMTFLTFPGHILLEALHLLELNDCCFPLTLLFIHQTGDAYRLSVKSQSCLGRELLAISVFPFKPDPGDSEILRALLTGSGI

SEQ ID NO: 38261 - protein, 43 aa, Homo sapiens
MPAARAADLAAPAGAALCAAAGTLAPVECPSQLRRNRERRWGT

SEQ ID NO: 38262 - protein, 88 aa, Homo sapiens
MSSRALAGAGCPSQRSAPSSLPEAESWGCWRLDAVSSRGAAFPPAPWAPAAPREPPAGSGARTAPLQGRLPFIPRQRRAAPFPWGSSP

SEQ ID NO: 38263 - protein, 35 aa, Homo sapiens
VWALARDLKGAVLFLMGAASATHSSFCLAGHSRLL

SEQ ID NO: 38264 - protein, 89 aa, Homo sapiens
MSLWVVTVSFLSWWCVPSGATLHFLSQAARTAQPCQCCDHGPVFGFHLLVLHKLLLSLWPRPLPRCGWFWPGRHKVAVGQDTSPVLALQ

SEQ ID NO: 38265 - protein, 46 aa, Homo sapiens
LHRLTVCLVSVIYMVLKCVYFCMSLFSLGLRGLRPELASPNTCCAW

SEQ ID NO: 38266 - protein, 97 aa, Homo sapiens
LRSSHPHIRLFSHASPQGPSVSIACLLLGSSWVQYTRTHTPVSSALCMPFRRPSWKVANRMSILGGSELTGSGQAPGKPGVWEQHPPWVPQSFQQAK

SEQ ID NO: 38267 - protein, 120 aa, Homo sapiens
MQILCNTTACFSFASFQTCHSSTYSLQATYALVAKATQSPSNTNSEEEPLPTPEVATVPSPCPCCWMWWAGSHPHAPLSGPARRLGDPEPVVAAPAAVRRGLLVPQSGRLFPSPCFPQLA

SEQ ID NO: 38268 - protein, 57 aa, Homo sapiens
LRLCRGSSASGRLGETKSRTGNIWCYYLGLGLTVGVQMVQALSMDLYVGVVSGFGGL

SEQ ID NO: 38269 - protein, 148 aa, Homo sapiens
VESRAWVAPALGREVTPRAAMPAHEDGFTQDAFMMPARQSHQNRKMEDAFCGKIVLFEISKRALQLSSQTEFRSSSHAGVQWRNLSSPQPPPPGFKRFSCLSLLITWDYRHVPPHLANFVFLVEMGFLHVGQAGLELLTSGDPPTSAS

SEQ ID NO: 38270 - protein, 28 aa, Homo sapiens
MPNTASLFLLLALYLAFTLNSHGMPTRC

SEQ ID NO: 38271 - protein, 47 aa, Homo sapiens
MAGMRRAEALLSFTAPGFPRVPAHPDARWQMQPHLKDTACWINPSPP

SEQ ID NO: 38272 - protein, 44 aa, Homo sapiens
MTRCFLWLFPAGPLSQRHFPTPNTQWAPPGSVPLRGTLAGARTT

SEQ ID NO: 38273 - protein, 74 aa, Homo sapiens [sequence omitted]

SEQ ID NO: 38274 - protein, 11 aa, Homo sapiens
VEPQDRSCLDP

SEQ ID NO: 38275 - protein, 86 aa, Homo sapiens [sequence omitted]

SEQ ID NO: 38276 - protein, 45 aa, Homo sapiens
MKRGTRQGQRMEKAPVLIKGGLLGLESSLLLVGRCKDVSREGLMN

SEQ ID NO: 38277 - protein, 123 aa, Homo sapiens
LQMLQMSMPRGRFAIPMCSVSMFLLHTLMLLPFLPILEGEKSLEGCPHCVHTTWVRNTIVKTLLYHTYSTGTKLGTCTYNQTTYSVCDPGNNQLYVCYDPKLLPYEFWFEIHIKSEGEKEGEL

SEQ ID NO: 38278 - protein, 34 aa, Homo sapiens
LHHPCRWGLLYKLFLYMFGCGFYSLVPLPLNPTI

SEQ ID NO: 38279 - protein, 36 aa, Homo sapiens
MVVFLTLMLFCKMFVEMFICIWISVMCHFSSSIEIQ

SEQ ID NO: 38280 - protein, 73 aa, Homo sapiens
LDVQSWPGHWALSQRQGHLGCDVKTPAAFGLLDGPLSLMFTVSVCVCAYVCVCICMCVCVCVLGAQWHVHVCV

SEQ ID NO: 38281 - protein, 141 aa, Homo sapiens
MSCDGRPVAGVTRNFPRPCGPWSVKKSVPVTRWSRLPFRISAVLSGTPTWQTPSSSNGIMGSQKVLEVVDTSKSQGAALVLGNHPVFLPGSGWRLFTLNKGWMDGWINGWMELEQRDGWRIGGTEGWTDGRMELEQRPALC

SEQ ID NO: 38282 - protein, 102 aa, Homo sapiens
MFPSVKWGTGNPPILGHRVLEEQTGVGCALRNSAPREVARLSRSLTGVCVAQPGDPRRLLHSLGCFQAQQRWFLSFGLDEGGWLSGDHLSLSPPEAESKRLH

SEQ ID NO: 38283 - protein, 95 aa, Homo sapiens
MVIPSLKSPFLQYTCMCALSLSLSLTHTHTHTHTRARARALLRTEAGGEGFALVSGTGLAGASPLHVSRFSLSVSPLPSQGLSPFHPPRGTSESE

SEQ ID NO: 38284 - protein, 30 aa, Homo sapiens
VLMGFYLGASWLHWSGTGRSWRARDGTGAN

SEQ ID NO: 38285 - protein, 94 aa, Homo sapiens [sequence omitted]

SEQ ID NO: 38286 - protein, 24 aa, Homo sapiens
MAGSSFESVIQAVEALEKNWSASA

SEQ ID NO: 38287 - protein, 223 aa, Homo sapiens
MGARRQPRAPAPGPRLRVRAQHPGKVGGRRWRKDARAVSRHGRGNCGAFAILSPSPYLRPRGRAHHPPSRLGGGRAPSWPPPSRPLNSPGDCGYCHRLASTASSRSTQMRTVGGKKGRRYSQRTAAAAPEASPKWPPPSRPPPPPLPPPLARNRYRRRGPSSRERQSPSKLQQVSSGTWASRFPWQPTSVALLRFTRGWFPDSFQTPLPSLRKLSRLRIPLRI

SEQ ID NO: 38288 - protein, 60 aa, Homo sapiens
LCFEVSFRQIPGDVQVYARVHTHHTYTHTSFFTQMVAYFILVCILLFFTNISQTSVHIKT

SEQ ID NO: 38289 - protein, 7 aa, Homo sapiens
LGRAGGA

SEQ ID NO: 38290 - protein, 41 aa, Homo sapiens
LNQLKTRKRRRKRKKRKMLGNIYLTCSTARTLASCCYSCKY

SEQ ID NO: 38291 - protein, 14 aa, Homo sapiens
MMKCACSSALLFLV

SEQ ID NO: 38292 - protein, 29 aa, Homo sapiens
TPRTGPGSSSFAAAATTAATAARGGSSRA

SEQ ID NO: 38293 - protein, 32 aa, Homo sapiens
ILLYFWLFFMYTELYVKRCFGIHQFPLPRTCL

SEQ ID NO: 38294 - protein, 34 aa, Homo sapiens
RMKTSMMSHLHLMTVSHWPATCSSLCLPDYNNSM

SEQ ID NO: 38295 - protein, 25 aa, Homo sapiens
MKKTSLIVQFIQIITSMGHFRPLDN

SEQ ID NO: 38296 - protein, 13 aa, Homo sapiens
LDLIIMCNMFIIL

SEQ ID NO: 38297 - protein, 68 aa, Homo sapiens
IWSFFFFNFKILRQALTMLPRWSQTPGFQRCSCLSLPKGWDYRCEPLCPAHLYISFGEYLGSFEGSCI

SEQ ID NO: 38298 - protein, 36 aa, Homo sapiens [sequence omitted]

SEQ ID NO: 38299 - protein, 44 aa, Homo sapiens
LYPESPVLNVDSIPRAGRKGTERFLSTAIAWTFLLSTPMPNCLP

SEQ ID NO: 38300 - protein, 33 aa, Homo sapiens
MYSGSRPKRNPCLLLELFMTSCSSSWSSSLFLT

SEQ ID NO: 38301 - protein, 37 aa, Homo sapiens
ILSVSLPCLLSFPFPLPVQLDPASGVPGAQHSAGQAD

SEQ ID NO: 38302 - protein, 75 aa, Homo sapiens
MWLPCIFFNFISSLAMYIHPSLSHALCRAFWFQNVPCAFLLWSSLNRMPFLPCLPVDRKILCIGELALTTIFLAC

SEQ ID NO: 38303 - protein, 19 aa, Homo sapiens
RNLLISFVTFGLLLLPHTH

SEQ ID NO: 38304 - protein, 34 aa, Homo sapiens
MAPSNLWAGITVCLVNINIPILLIIFMLGQVLGQ

SEQ ID NO: 38305 - protein, 35 aa, Homo sapiens
IFKCNLLTYLLFMYLFKHQIFVQEFGKIEDESLIE

SEQ ID NO: 38306 - protein, 20 aa, Homo sapiens
LLHLCYLGTSVILAASTCLS

SEQ ID NO: 38307 - protein, 31 aa, Homo sapiens
LQTMGTLGSLGVTMLHLLFICLGKSCSSHTL

SEQ ID NO: 38308 - protein, 15 aa, Homo sapiens
LLKAMIVFVLLPPTS

SEQ ID NO: 38309 - protein, 57 aa, Homo sapiens
IPRRRFSGLGFLPYSLLLPLSGFYRPFAKQLSTQWSFMSSCRKYSSTDVADFAPWQN

SEQ ID NO: 38310 - protein, 23 aa, Homo sapiens
MGFWVGVLVFLCSFKLSPTNRKL

SEQ ID NO: 38311 - protein, 42 aa, Homo sapiens
KHFQSLSGAQRFGRLIDHGARVLLVAAAAAAGARLCDHARTL

SEQ ID NO: 38312 - protein, 49 aa, Homo sapiens
MLTVLSPPAFGLGFSSLFTCRLSHSLPFPQHHSPRKSQCFPPIILSADP

SEQ ID NO: 38313 - protein, 30 aa, Homo sapiens
IAIKGALTVHSAISLFLCPQIPTTAPRGWA

SEQ ID NO: 38314 - protein, 22 aa, Homo sapiens
TPTFLFALLSLSHILETVFNTH

SEQ ID NO: 38315 - protein, 18 aa, Homo sapiens
IMKFVDTVMILILAMVSQ

SEQ ID NO: 38316 - protein, 52 aa, Homo sapiens
ISTASSESLLMPTLTLFPSALIATGGHAQHQATSEPRRSSVAFPWPFAIRCL

SEQ ID NO: 38317 - protein, 27 aa, Homo sapiens
MQLKYMLLTFFFFLKSSVDKTRGMWTF

SEQ ID NO: 38318 - protein, 35 aa, Homo sapiens
ISLTTRGTMRRLLPSTWTGSWTSAGSLPWPAGWST

SEQ ID NO: 38319 - protein, 56 aa, Homo sapiens
RRQIAHGHASCWLYTRTKTDKYPHHDVTHIAADFFREKCVLLLFETSVVVALYCNI

SEQ ID NO: 38320 - protein, 114 aa, Homo sapiens
MYSFKHHLCPPGFRIALDMGYTKREWNFQEAAVLWVTVILYSLKLSSFNWPLGAKAPWRVTPIRSGTLPLLPNLRAEMASTAPSRTQRRCTAATEVGRMIRLPPKAQFLQQVNP

SEQ ID NO: 38321 - protein, 20 aa, Homo sapiens
LAVFRAVMFLGYVQDFRVLA

SEQ ID NO: 38322 - protein, 38 aa, Homo sapiens
MLGCLLVVFLCCLILGKLLCKAKNPVNTILSFTGRHYW

SEQ ID NO: 38323 - protein, 59 aa, Homo sapiens
MLVSKNQQKKKLRKLRTNIKKIKFRIRMISLICPFFLWSKTLLNFCKYFDLMCLRSSLF

SEQ ID NO: 38324 - protein, 22 aa, Homo sapiens
IFLFLPIFSFPQIFLLLFYHLE

SEQ ID NO: 38325 - protein, 33 aa, Homo sapiens
MLPRRRVFFSLFFQIFCMFKHFHSRKLGGKSVS

SEQ ID NO: 38326 - protein, 54 aa, Homo sapiens
MQYVLNKYILRQTEQGPSLFCLQLCFLIAAFQNVTLANYQERGTNLRDPDQTAS

SEQ ID NO: 38327 - protein, 58 aa, Homo sapiens
MSLSRAAQGPHSWLLTLASPMAALQTLLLSSPHIRTCCSHSGVLKSMNRYCCIFHNAD

SEQ ID NO: 38328 - protein, 70 aa, Homo sapiens
TARRSAALWAQPAARKAARGSGPVWLGAAAQVVARAVVARSPSRPRAQPQSASSRSGTRPTPVSVPGCAC

SEQ ID NO: 38329 - protein, 62 aa, Homo sapiens
LVATIRKSNTNSNCFLLFTFASLLVELWQVLISNTEHDLPPANVEPGIAASPDSSFIHSDSP

SEQ ID NO: 38330 - protein, 9 aa, Homo sapiens
LVALITVMI

SEQ ID NO: 38331 - protein, 108 aa, Homo sapiens
LAARLGWDRCGACVVAPLGAGVAAAGTVLRTAEGQAAPAGLVVGAAPAAAAAAWAGEAARTAPDSSWRSGLPTWRRATWRPSVRGTSGTGRTRGCVRRTPGCGSRTGG

SEQ ID NO: 38332 - protein, 65 aa, Homo sapiens
LWWALSPGFLAACCACGSLGTVGLCVCPCVCMCVCMFLSPLDSCTKWLMGTISRQIVKIDRKSFS

SEQ ID NO: 38333 - protein, 56 aa, Homo sapiens
LLLLLLFQEHTLRTIVLLLCTPTHSQLPRKKSTSRAKISVEVLVPYLVQDLPSRIS

SEQ ID NO: 38334 - protein, 101 aa, Homo sapiens
LDLRGKKKREGEREKEEQERSRKEEEVAKNQLPCWICLSQHLGEALGFFLKGLIFRTPHLSSLLPASSLLWWLGCFFHDFLNLDWAVLCVKPISCDLLLTV

SEQ ID NO: 38335 - protein, 26 aa, Homo sapiens
LNIAMKFSFVIGSLGRVSFCSTCCLP

SEQ ID NO: 38336 - protein, 51 aa, Homo sapiens
IHTHIHTDTQSHTHSHTLSLSLPLSFSLSLSLCPFLLDRSTVIHRNKHTRT

SEQ ID NO: 38337 - protein, 55 aa, Homo sapiens
LQILPGARQALRPGALAVGDPPRIPPLLRAPRGLWRLGLLSGLSWLVYALCLISG

SEQ ID NO: 38338 - protein, 33 aa, Homo sapiens
MARAAAAACGSCSWRCCGHTPATRSRPSAFGPI

SEQ ID NO: 38339 - protein, 35 aa, Homo sapiens
IPKKKKKKKKKKVVTIAFSVSYLFWFAETSPKQEI

SEQ ID NO: 38340 - protein, 35 aa, Homo sapiens
MPDGMRWDVKPLLITTLLASIAFVLVSNCMVSVDL

SEQ ID NO: 38341 - protein, 91 aa, Homo sapiens
MKAQMQAKSLEFSAHSKCSMNRLAAVRWGHSLLLSGCLTVPCPCLTGPSISAGELSSADKPAWHGALPLLLVPDPFCPEENFLSPGDAWPR

SEQ ID NO: 38342 - protein, 81 aa, Homo sapiens
RTGLGFHLCVCKCVCACVQVSVCKCVHMCACACMCTCTPMCECVQVCECVQVCVRVSMCVQVCACVRVCACVCSGACGSRV

SEQ ID NO: 38343 - protein, 62 aa, Homo sapiens
LLSSSLLFIFKFLFISPCVTTFFPSAPLPVPLPAPPPPCYPTLETTAVGRVPSSCQPHLLSC

SEQ ID NO: 38344 - protein, 66 aa, Homo sapiens
IEISLLARGNHRLFSRILFFSHLLAFFFLPPWLPSPNPAIPSSTPVLPSPAILSHPTCNLLSFAPP

SEQ ID NO: 38345 - protein, 9 aa, Homo sapiens
LLFIINLLG

SEQ ID NO: 38346 - protein, 53 aa, Homo sapiens
TPATPAALRTVLAVAAAAPVSRWARTQPLGAVAFPASQRQKRGSGTQKVGLRL

SEQ ID NO: 38347 - protein, 80 aa, Homo sapiens
LHPSRHSAVSCLGVAAAMARKALPPTHLGQSWFCSCCRDTELAISALRARTATGSPGSCRCTAGPLPCASALESCCCRVT

SEQ ID NO: 38348 - protein, 33 aa, Homo sapiens
LSHSLFPLLLLPAAQLEPWEAASFSSFSHSVSG

SEQ ID NO: 38349 - protein, 106 aa, Homo sapiens
LPRHSPLDLNLKSPSLPWLDPGDPFALPSAPSPTDLLCDLRPVCRPLWASVFPAMKTAISQSCVKQKRKAGGRPWANGRALVIINIVAAVVLLLLINIHIIYFILT

SEQ ID NO: 38350 - protein, 99 aa, Homo sapiens
VAEAQAVAAAAQEAADGELREQARPGSLAAAWLQHARPPGAAAAAAPLAARRALLLFSLVLAAVLRLCGARHSEHLPLHDASPRHSDPGQRENNRCSGL

SEQ ID NO: 38351 - protein, 9 aa, Homo sapiens
LVFSLVSFF

SEQ ID NO: 38352 - protein, 76 aa, Homo sapiens
LRNRGLLEGVKGACVDVAVAVCVSVCLCVCTVYMNVPQDMAYNGLGGPNNIKYILEMRVPVLDRPRHAFCFSFNAP

SEQ ID NO: 38353 - protein, 43 aa, Homo sapiens
LLLVGCFSPLLRLGNPFPHLHGAGVSGPGLSWLTAALGARLAG

SEQ ID NO: 38354 - protein, 8 aa, Homo sapiens
VLVTLAFV

SEQ ID NO: 38355 - protein, 64 aa, Homo sapiens
VWLCLSSALLSPPFFLSVPRVRPPPPPRERRRRGSGHSRSYLVVSGCHDLYSTALQRRAQLDQF

SEQ ID NO: 38356 - protein, 54 aa, Homo sapiens
ICLLLILMLPAQQVHQRARMNYGCHECPCEAVGKPWLDCEGYLKSILESTRSSM

SEQ ID NO: 38357 - protein, 13 aa, Homo sapiens
IGLSGLLIPATFW

SEQ ID NO: 38358 - protein, 56 aa, Homo sapiens
MGIGIEQLGGGAAAGVFCPIPLPISSSSLPQTPTSPSSFPSRSPESICLPPLHNNN

SEQ ID NO: 38359 - protein, 54 aa, Homo sapiens
MLSLVHLLSPPFSSPLLPTSATATSSESERTAPSAGTEPPTASNLRPRRRQRAQ

SEQ ID NO: 38360 - protein, 46 aa, Homo sapiens
MGALLGAPSPGRGRGRCCCTKVPRTALASLCATSSCTHPSRPCTAA

SEQ ID NO: 38361 - protein, 80 aa, Homo sapiens
MRPKAPAASLLATFPISQRLIPLTPARKHCPSESETSTWVVSKAPATPRTRGAGPTSPPRPTRRRYGVQFAEAVCCGRGV

SEQ ID NO: 38362 - protein, 82 aa, Homo sapiens
MRTSWWWPRVFQTACSPALRQRMRRSWRRAWGWMVPSQPRSLLAAPPGSCRRSVRRMSPRRGGSRGPRPGRRMALWNCQPRA

SEQ ID NO: 38363 - protein, 61 aa, Homo sapiens
MVSGAGVSAVAPLPSPSCMLLPAGNPDDLQCSQGAGSAVQTQGSHGTRRSQELDPKAVRGC

SEQ ID NO: 38364 - protein, 95 aa, Homo sapiens
MRIDPQEGGGVKAIGPLGRRSMRLGPRRRAACGRVAFGSSTFALVPVFAHLSILQSLVPAAGAASPVAISAQHLCYSHVTPGDPGAGAGQGPAPS

SEQ ID NO: 38365 - protein, 102 aa, Homo sapiens
MAPASHLPEETLYISPRFLMPSEGLRSGVCHTFLLTSNCHWDRVLGAYIFLRVFISLTCVDLITLTLPSWKGPVTPQMSGQLQGRRKNRKSSFNSSRNKRND

SEQ ID NO: 38366 - protein, 138 aa, Homo sapiens
MEVEVSQDRTIALQPGEKKKPGLLMYSFKHHLCPPGFRIALDMGYTKREWNFQEAAVLWVTVILYSLKLSSFNWPLGAKAPWRVTPIRSGTLPLLPNLRAEMASTAPSRTQRRCTAATEVGRMIRLPPKAQFLQQVNP

SEQ ID NO: 38367 - protein, 74 aa, Homo sapiens
KKKEALLTVFLLQFFSYSTITIINELLFSTQRWLFQHILIKGTEYITLMSKWTKDLRSIVIISVSGQQKKELSS

SEQ ID NO: 38368 - protein, 94 aa, Homo sapiens
MSQDNDKLSKFFLLLLPGPASTLLLFYHAAFLLEPEQLPEKRRTSKAFWNSPRRSGWRVPLKWTGPTISQSWPFTSCPLSSGEPHVWKSCGGCW

SEQ ID NO: 38369 - protein, 17 aa, Homo sapiens
ITGMLYWTSLLSSAPAP

SEQ ID NO: 38370 - protein, 32 aa, Homo sapiens
LMLLTTWLLHSHQTRDAILDFPTLICSSPLTL

SEQ ID NO: 38371 - protein, 31 aa, Homo sapiens
KSWLVNLSMLLTEGVLGLFSGRNSMSLKQAF

SEQ ID NO: 38372 - protein, 41 aa, Homo sapiens
MYYRYNCTKIVQPKTICNCLLFYCILFVFLRPLIAFCNLMA

SEQ ID NO: 38373 - protein, 40 aa, Homo sapiens
KMEPFFLSFFFFKFCIFHPTAVCRENIMQMPLIFYPMFTS

SEQ ID NO: 38374 - protein, 37 aa, Homo sapiens
LALKFVFFPLAMAPFSTSAFHSNSHRLGINRIKAKLG

SEQ ID NO: 38375 - protein, 74 aa, Homo sapiens
RVTVVRPAPLDPLVLLVLLVPLAPLALLARVVIVVRLVLLVPPVLSALLAPVAPPDPKAPVVTRVRQANRATEA

SEQ ID NO: 38376 - protein, 159 aa, Homo sapiens [sequence omitted]

SEQ ID NO: 38377 - protein, 65 aa, Homo sapiens
MLLGRSGHLLLALIPAEFLLLISGPLMLLLRRYFPASLPLRHRLRTSLNARQDSVRMDRAARSRR

SEQ ID NO: 38378 - protein, 28 aa, Homo sapiens
MISFTWLGVLVRMAGQPVHRFASWTLSK

SEQ ID NO: 38379 - protein, 31 aa, Homo sapiens
MKPESACALPRALLCLSIGLLAAPLPTACRC

SEQ ID NO: 38380 - protein, 97 aa, Homo sapiens
MGSCPGLTWHMLGKPLGARAGGRASAAPPSPTQGVRNTAERESGAFMLLLPPLVHGFFHLETPGGGHCCTACATDQNRPKLSEGWDHLRLCSTYVVE

SEQ ID NO: 38381 - protein, 89 aa, Homo sapiens
MHLQPPQPKAPKTKHAVHTQQLFVSHSWPISCIISLSFIEPRSLHALWNSGSSFCMKLRVFIFRGTQSLLALWNLESQGLCAPWNLGSV

SEQ ID NO: 38382 - protein, 167 aa, Homo sapiens
MSPSVAQSLSVTLPATPSFSFLPPASLCISPSHPCLLSSLSFSSSPCHASLITPPHSAFPPTHGLLSLSLSLSPPPSFSLSLFLHLLPTPFPLYFYWLLCPLLPSSLPHPGKLLPPILAPAPPGCVLEMGGDVPGSGWEVRAGDQMGEALWTAVAEGLGGNLSPQAV

SEQ ID NO: 38383 - protein, 16 aa, Homo sapiens
MGWASRDRPDASSRWS

SEQ ID NO: 38384 - protein, 25 aa, Homo sapiens
MLLFPLFLLLSLDLCQKEGYAESLI

SEQ ID NO: 38385 - protein, 32 aa, Homo sapiens
MPSPPPASAAGGCTHLCPWPAQAHHFLAPSTF

SEQ ID NO: 38386 - protein, 56 aa, Homo sapiens
MTAAWIFTGFWRSSSCSNALRIAATPSSTSPRGRSTRQVMRVHTRPTAWSATAVWA

SEQ ID NO: 38387 - protein, 78 aa, Homo sapiens
MAWTESCTAACAFPSCLVLLYRGRGVPTDLQVPAPLFSTQSKLKRPGESPISKDSCYVRKPPRRAKKRSQGWLFLRDA

SEQ ID NO: 38388 - protein, 53 aa, Homo sapiens
MGTLCTVRSLGGACWCIPAGTGMSSKAGSSSLAPRKDGISSLPSAKTPGGSLG

SEQ ID NO: 38389 - protein, 58 aa, Homo sapiens
MAQSCKDGCGSLISPWLTCVCNAAAVARGKDTASDSNSDSLLQCVTLSQSQISAFSQL

SEQ ID NO: 38390 - protein, 23 aa, Homo sapiens
MVDIRPWSAAWKFPVNKKNIIAS

SEQ ID NO: 38391 - protein, 31 aa, Homo sapiens
MPGLTLLRSCFYEDVSQQLSVFPMSHRQPLQ

SEQ ID NO: 38392 - protein, 57 aa, Homo sapiens
MRKINIVIYQPASSQQFLPACPCKGRSGAASCSNYLWSQLNSFSPELQKVPESPQST

SEQ ID NO: 38393 - protein, 160 aa, Homo sapiens
MACIYPTTFYTSLPTKSLNMGISLTTILILSVAVLLSTAAPPSCRECYQSLHYRGEMQQYFTYHTHIERSCYGNLIEECVESGKSYYKVKNLGVCGSRNGAICPRGKQWLCFTKIGQWGVNTQVLEDIKREQIIAKAKASKPTTPPENRPRHFHSFIQKL

SEQ ID NO: 38394 - protein, 64 aa, Homo sapiens
MRNGGLRSRRKISSPTSPLLQSALLSTRDLQWRPQAAASVFDRPFVSTLPALAGWVRQASPARL

SEQ ID NO: 38395 - protein, 12 aa, Homo sapiens
MAIMWSQEEPFC

SEQ ID NO: 38396 - protein, 129 aa, Homo sapiens
MGLRQPPSTYWAQAQLLALSCTPNSTQTSTHTHTHTLTHTHTWRARSTSTSTISARRHRICSGHGGAGQTGRLGGWRTELQTKAGDPWRGGMASTPGSLCVRHSPWTHTHRHTHCLDACMHTHARTRAP

SEQ ID NO: 38397 - protein, 32 aa, Homo sapiens
MASLSLQIISFNSLIAPVSLDGFLLPTTKNPN

SEQ ID NO: 38398 - protein, 6 aa, Homo sapiens
MAGKRI

SEQ ID NO: 38399 - protein, 23 aa, Homo sapiens
MGRRKSWREPSLDFGSFWKMLQL

SEQ ID NO: 38400 - protein, 50 aa, Homo sapiens
MKGLVKGLQGDGLGGRRFLFLLPFCLCSPNVPVSPLPHLGPLFGPCGQSC

SEQ ID NO: 38401 - protein, 27 aa, Homo sapiens
MKIHLCMVIFLNFMAQKEQEKQKCFIT

SEQ ID NO: 38402 - protein, 29 aa, Homo sapiens
MLVSQNGLGNATPLLSERVYIRASLCRPC

SEQ ID NO: 38403 - protein, 32 aa, Homo sapiens
IDTLKVLHMIRKQLWKMTAFISLNILPYGTDQ

SEQ ID NO: 38404 - protein, 50 aa, Homo sapiens
LESPAAVGLLLLLWLSLPVRLPSFVVSQRCAGLLLAALRIQGVGCQVQVS

SEQ ID NO: 38405 - protein, 6 aa, Homo sapiens
VLVFLM

SEQ ID NO: 38406 - protein, 29 aa, Homo sapiens
LFRPRRRFPVTRALTSQLSLAVLLRVPGA

SEQ ID NO: 38407 - protein, 36 aa, Homo sapiens
MSPPAAAAAASASRARAPASRSRSRCLGHWPPDPRL

SEQ ID NO: 38408 - protein, 10 aa, Homo sapiens
LTPSVVRKQW

SEQ ID NO: 38409 - protein, 29 aa, Homo sapiens
LSLPASTLAAACQSSAASPSPTTEARGRQ

SEQ ID NO: 38410 - protein, 37 aa, Homo sapiens
MSFIFISSFFLMVKPCENELQYYSFNSHGHSHSEERS

SEQ ID NO: 38411 - protein, 58 aa, Homo sapiens
RSAPAPATFSESGKGARGHMSPSRPTENETALQQIGWKELGLFSLFFTLERACKHCSF

SEQ ID NO: 38412 - protein, 34 aa, Homo sapiens
LPPPPPPPPPPPSARRTGRRSRSWRRSRRRQLPA

SEQ ID NO: 38413 - protein, 22 aa, Homo sapiens
LSHSRRRCGPTACWRWSHRTCP

SEQ ID NO: 38414 - protein, 57 aa, Homo sapiens
MPAPCPLQPLEEAGGPGGHGNSRYTLWRLLAWVVWALGGSPRSMSTMFLGTSGYSWL

SEQ ID NO: 38415 - protein, 49 aa, Homo sapiens
RVLKLSSLWGCVFLVPGSPRLPRRTWKRKEQSLQRLQREDKKRLHLGEF

SEQ ID NO: 38416 - protein, 91 aa, Homo sapiens
LLGQPPPQRETEVRLRFLQDRPLLLLSPNPFLPRVPGSQGNRTNCSLGGRATAEYKAFRPPASLALMAAPFRPVSSGLSMPGLISTRLGNS

SEQ ID NO: 38417 - protein, 22 aa, Homo sapiens
IMKFIHDLDRTERRQMEVTQLV

SEQ ID NO: 38418 - protein, 26 aa, Homo sapiens
KMPGHPGSCEVFRCIISSLNILLVRL

SEQ ID NO: 38419 - protein, 19 aa, Homo sapiens
LASRTRVCSPSAISQVCGR

SEQ ID NO: 38420 - protein, 74 aa, Homo sapiens
MQALPPRHLLSCMGLQPMPAPCPLQPLEEAGGPGGHGNSRYTLWRLLAWVVWALGGSPRSMSTMFLGTSGYSWL

SEQ ID NO: 38421 - protein, 48 aa, Homo sapiens
RGRGEGVRDKSPSFLCFFFSFAFSSFIFLFVCIFFPLLVEVRFPPTRP

SEQ ID NO: 38422 - protein, 41 aa, Homo sapiens
MYRCALCVQSFTLTTSLCHLAEVVWFTITAISAFLSGKPEA

SEQ ID NO: 38423 - protein, 17 aa, Homo sapiens
IAVCRFSALAVGSTCVL

SEQ ID NO: 38424 - protein, 45 aa, Homo sapiens
KFSGSPEISRVTFVRPANLIKILLESALLVSYLCQISSWETAVTT

SEQ ID NO: 38425 - protein, 16 aa, Homo sapiens
IRFLWTQRYEINQPHV

SEQ ID NO: 38426 - protein, 12 aa, Homo sapiens
ITLRLLLAMTAS

SEQ ID NO: 38427 - protein, 56 aa, Homo sapiens
MQSGPLWSGFWAPRLPGSLPFCSHLHLSSALPECWPRPAWGKAVGIVLAPSSSSPF

SEQ ID NO: 38428 - protein, 49 aa, Homo sapiens
MRQEAPQGSSGPPPPISSHTALCTFCSFFCKPKTALNNEVRHAETAHGC

SEQ ID NO: 38429 - protein, 64 aa, Homo sapiens
MFSLSLSLSLSLSLSLSLSQAGHHSVISSNKTSQVPKTFNSKRNPPSPRQKRRSHRPDGVEWTL

SEQ ID NO: 38430 - protein, 18 aa, Homo sapiens
MTDNCMSSILPTAARGRL

SEQ ID NO: 38431 - protein, 48 aa, Homo sapiens
MGPGPTSGHWPTATAGGPSSWREKGQVSIHAPRSRRPTSSRSSGEGDT

SEQ ID NO: 38432 - protein, 37 aa, Homo sapiens
MKATDCDNLLCTQSKCIFLSFLFSSWGLQFTVVSGQS

SEQ ID NO: 38433 - protein, 97 aa, Homo sapiens
MRRLLSGCGWRWSEAWCSSLVSFCLSLSSLGPPARGTVITSPREVVRAARRWAAGSPGGRAGGAETSAGLMSALSARGPSLPVRAGHCRMAPLLCGC

SEQ ID NO: 38434 - protein, 35 aa, Homo sapiens
MQKWFAELAVHLHLLSAGCIIMRKSPLFPTIGSLC

SEQ ID NO: 38435 - protein, 48 aa, Homo sapiens
MKEGCQVRAQPGSSHTSIYPAPQHWAPALTCPGPTVKTHPQKMHFGEE

SEQ ID NO: 38436 - protein, 112 aa, Homo sapiens
MAAVTAGEDCLRLPGQRLWCQVSSRTDGRPSSQRVKGQLLSPPGLLHPVNSPRNYQHPPKGHQPPCERTSQRPLELGCGRMWGAAWSCLPLPQRDMRDGAGLATWRGSHSWS

SEQ ID NO: 38437 - protein, 36 aa, Homo sapiens
MDPCSDLVLVLWNQLCTRPQKVCVPEPSCWGLSLLI

SEQ ID NO: 38438 - protein, 32 aa, Homo sapiens
MNHLGHHICSISLQLAHRSPRCFVHIPLPFLL

SEQ ID NO: 38439 - protein, 40 aa, Homo sapiens
MLRAVSTWRFRLDPSCSGARLGGPRSLSFLASLGCGTKTI

SEQ ID NO: 38440 - protein, 47 aa, Homo sapiens
MPFFTLQLSSHYISGTIGVPGGYWSEVSMILTQETYSPDKNFHQNSR

SEQ ID NO: 38441 - protein, 156 aa, Homo sapiens [sequence omitted]

SEQ ID NO: 38442 - protein, 26 aa, Homo sapiens
MDTPLEPPQRQVARVRPATRPTLSYL

SEQ ID NO: 38443 - protein, 57 aa, Homo sapiens
MCCQIRGHYTKCVEPLPRGASTADIHSSAPPQPLLPLPSTAHGRVMRETQYRFIIRL

SEQ ID NO: 38444 - protein, 23 aa, Homo sapiens
MQLEPPEDDPFCLGPLDQPLEKL

SEQ ID NO: 38445 - protein, 64 aa, Homo sapiens
MAEANQSQDLNQGTNQLCTGMRFLHLPVPGIPPCFLTNQQSPHFSPTCSDPLQAPSPNPGGRRI

SEQ ID NO: 38446 - protein, 19 aa, Homo sapiens
MEFMASVLSEGEKNSHSSA

SEQ ID NO: 38447 - protein, 59 aa, Homo sapiens
MWIKPSVAFAASPLCFGLWEPRRKPSPLQMRPQLLHSEQSLLTLSANSSESTPISSGES

SEQ ID NO: 38448 - protein, 62 aa, Homo sapiens
MTRCVHLGISTTSLTNIACATPSPATPEPRRGALSSAPACPMDTPVPAMTSQGPEELSREQL

SEQ ID NO: 38449 - protein, 24 aa, Homo sapiens
MSILPGLWVSLLSYTSFQVTWDHG

SEQ ID NO: 38450 - protein, 61 aa, Homo sapiens [sequence omitted]

SEQ ID NO: 38451 - protein, 49 aa, Homo sapiens
MVKANFPSVGAGLGVVGRAGRRPRTMQNRQDVSQSRLPCPSGPWGLLRP

SEQ ID NO: 38452 - protein, 37 aa, Homo sapiens
MPFGSSGSCISGHAPCQPRQPRQHYHGMCFKIMQTLF

SEQ ID NO: 38453 - protein, 53 aa, Homo sapiens
MINTRSLKEPIACDRYRASALGLSAPPVREASGANGAEGIVGLGPSLFSFPVL

SEQ ID NO: 38454 - protein, 50 aa, Homo sapiens
MHTPPGLTGALENDRSPDLSPTTDAWSKGEGRRLMDPPCSEFPPLYVPLC

SEQ ID NO: 38455 - protein, 21 aa, Homo sapiens
MRKIFESTYDYKPLFQDILPF

SEQ ID NO: 38456 - protein, 29 aa, Homo sapiens
MRSAVPATWTAASPAWSLLPRPPEPRAGA

SEQ ID NO: 38457 - protein, 49 aa, Homo sapiens
MRLSLFFSLSLPSLSIPSFLPPSPSPSHYSVSYPCQFPRVSFFPSSYCV

SEQ ID NO: 38458 - protein, 27 aa, Homo sapiens
KEKSSCHWWWLGWLITSMLSCKEEFPD

SEQ ID NO: 38459 - protein, 6 aa, Homo sapiens
LQALRK

SEQ ID NO: 38460 - protein, 23 aa, Homo sapiens
MVLLCCQSGLKLLALSDSLTSDS

SEQ ID NO: 38461 - protein, 8 aa, Homo sapiens
LPLPEDFR

SEQ ID NO: 38462 - protein, 66 aa, Homo sapiens
VGPEGTSRFFTPHGPHVSVSGTSRFFTLHGSHVSVSGPLFPYMHCRPAPPSSAPENGGKVSGLGAR

SEQ ID NO: 38463 - protein, 23 aa, Homo sapiens
KCIFLSFLFSSWGLQFTVVSGQS

SEQ ID NO: 38464 - protein, 58 aa, Homo sapiens
VCPWLQPLSPRSPRLPLRPPFSLDELASFLFSAMEFCSVLLALLSQRNPRQQMPIRSV

SEQ ID NO: 38465 - protein, 33 aa, Homo sapiens
MSSFFHLLCSCCTATAQYIIFQETLLYEGLHNS

SEQ ID NO: 38466 - protein, 67 aa, Homo sapiens
IHKQNPTMAVHRLQATLLLSQRKMGIHKPRVLQKGAISSQDMQTSTRFLGLICCLLGYAILLQISKD

SEQ ID NO: 38467 - protein, 54 aa, Homo sapiens
TGPAAVLQTGEKRKILMFRKCHLFQTLFLSYAVLHLHLCCQQTYFPKQIQGKNR

SEQ ID NO: 38468 - protein, 16 aa, Homo sapiens
MTAKKPKRPKSTRQKE

SEQ ID NO: 38469 - protein, 23 aa, Homo sapiens
ILLQHCHLRIHKPTLVRIQPSVF

SEQ ID NO: 38470 - protein, 33 aa, Homo sapiens
MRSTLISSLDSLLPVIPHRTEAEWVVVMFDRRH

SEQ ID NO: 38471 - protein, 44 aa, Homo sapiens
KPLNFFGLALGSVAPGTPSVSILGWTLDRNLCSTVVVKCGCLAS

SEQ ID NO: 38472 - protein, 25 aa, Homo sapiens
MLCLLILGTMHCRTFRLELSMVLRF

SEQ ID NO: 38473 - protein, 23 aa, Homo sapiens
LVPWVYFVFLSLLHLSRPFRAAL

SEQ ID NO: 38474 - protein, 65 aa, Homo sapiens
MQFWECSGSLCSFLSCKPWAPLGPLGSLCYTCFLSVWARAAQATPCDTEISYENTQPACSPPGRC

SEQ ID NO: 38475 - protein, 61 aa, Homo sapiens
MQFWECSGSLCSFLSCKPWAPLGPLGSLCYTCFLSVWARAAQATPCDTEEDSTLHSHLLCS

SEQ ID NO: 38476 - protein, 37 aa, Homo sapiens
MPPTLIPRELRCFLLPWPLDPAIASIPGHLAEAGNSG

SEQ ID NO: 38477 - protein, 18 aa, Homo sapiens
TNFPVLMELAFKREGGRQ

SEQ ID NO: 38478 - protein, 27 aa, Homo sapiens
KDKERLGTDFSLIQVMKSSHLRGCDHG

SEQ ID NO: 38479 - protein, 25 aa, Homo sapiens
MASSEILGCFWLLLASPVGEAADYI

SEQ ID NO: 38480 - protein, 19 aa, Homo sapiens
KDILIFLILLLIIKESLLD

SEQ ID NO: 38481 - protein, 25 aa, Homo sapiens
IIKKAAAFSRRLFLMICILARGDQL

SEQ ID NO: 38482 - protein, 55 aa, Homo sapiens
LVSGSLCLSLTLFLAFSVSLSLSLSLPRPLPQTCPPAPSAMWRTFKRWRCWNVTG

SEQ ID NO: 38483 - protein, 85 aa, Homo sapiens
LSENSCRGCCCWICWAHVQFFCKFHRASVPYLWNHICLRLLLCIPAFIGHFGTLFQEAPWTGEWHCHCWQQCLHNPAAFALKGSD

SEQ ID NO: 38484 - protein, 20 aa, Homo sapiens
LFFFSFFYFLWILWLITQQV

SEQ ID NO: 38485 - protein, 63 aa, Homo sapiens
LEEGSGSHVRLALQVHFHSSLRPLPWGVMFCYRDPRYQIAPGLIWGLGICHSAVQTLIFFSSF

SEQ ID NO: 38486 - protein, 39 aa, Homo sapiens
IFKSIFFLSKTCLWGTFEIWNQSCTLYIYCDTQSKIPQD

SEQ ID NO: 38487 - protein, 28 aa, Homo sapiens
RLMKFAFRSLLPLCAILMPLLSILNLRA

SEQ ID NO: 38488 - protein, 17 aa, Homo sapiens
ILIFLILLLIIKESLLD

SEQ ID NO: 38489 - protein, 54 aa, Homo sapiens
LESCFLIVFTLASAKEENSMMCLRALTGLRFLMQAFIISERTIPFPGRRTQRNW

SEQ ID NO: 38490 - protein, 10 aa, Homo sapiens
VKVSAFLLFG

SEQ ID NO: 38491 - protein, 12 aa, Homo sapiens
MLTSTLFIFQCL

SEQ ID NO: 38492 - protein, 11 aa, Homo sapiens
LTSILFILQCL

SEQ ID NO: 38493 - protein, 64 aa, Homo sapiens
VTSCTWILRTSGSWATCWSVCWPITLAKNSPHQCRLPIRKWWLVWLMPWPTSITKLAFLLSNFY

SEQ ID NO: 38494 - protein, 23 aa, Homo sapiens
LQRLLVFQVFLFIQLDTMMHRSS

SEQ ID NO: 38495 - protein, 49 aa, Homo sapiens
ILSTTCSSCWLDYWPFLMASCTLSMMVRVAVTAPTSRFWRQVRAPPASR

SEQ ID NO: 38496 - protein, 29 aa, Homo sapiens
KKWREHSVSPTSFLTLLPYLSFFPTGLSR

SEQ ID NO: 38497 - protein, 52 aa, Homo sapiens
MVLESTPFTTAWLQKCRKSTGLRKDTALLVLPCTILPMTRGLASYCILRTSS

SEQ ID NO: 38498 - protein, 99 aa, Homo sapiens
MAHPERAWKLRAPSHRLSPIHLFIWCSSIAFVMSLIVNRKTQVLSTLPKLECSGHSTGGIIAHRSLKFLGSSDPPISASQVAGAIGMCHHTQLFLLIAK

SEQ ID NO: 38499 - protein, 125 aa, Homo sapiens [sequence omitted]

SEQ ID NO: 38500 - protein, 59 aa, Homo sapiens
MEQTHHLPKKAEGETVPLLRDTMTLMPVSMKGTEKSTTSDRSSLMMATEEFDDLPKLPR

SEQ ID NO: 38501 - protein, 115 aa, Homo sapiens
MYYHLTHFLASLFTCLLFFIDVQSKTQRSWRIFLTSHSKGMEDSGQEYTILSFQHVTQQNKRRNHNWSMTVTVISFLLPVAGVCVSLQLNPGQGDPRTAEEACLHMSPRTSPAIM

SEQ ID NO: 38502 - protein, 54 aa, Homo sapiens
MDWHFPAAPSLSTTGAQPGHRRFNEGRAERPNPPSHRACSPPWLLPAPGPGLTT

SEQ ID NO: 38503 - protein, 19 aa, Homo sapiens
MRGVSAVSWIWFQPHLLHV

SEQ ID NO: 38504 - protein, 44 aa, Homo sapiens
MIKLYSPLFMTRYNSPSPLKSQLLVSLSWTSVIGRLLMSIFNLC

SEQ ID NO: 38505 - protein, 42 aa, Homo sapiens
MEAPCRNMVLTLWGLYPKLKGLEKPLKSRDHNPPPSKDKTSH

SEQ ID NO: 38506 - protein, 38 aa, Homo sapiens
KLGRMTQSGRRGLGLQVSALASVGPHSFASFAPCLSFL

SEQ ID NO: 38507 - protein, 71 aa, Homo sapiens
IWEWQTDSAPGEHHIKDKCVCLKMASFGLAWWLTSIIPALWEAESKCTVLVKSAVAYSNVQGFHIHSPLAH

SEQ ID NO: 38508 - protein, 33 aa, Homo sapiens
LDRLFSLLLPVGLFLKRMAELPTCSNTIRTKVA

SEQ ID NO: 38509 - protein, 70 aa, Homo sapiens
LAPGGSSSSLHICFFLMKLLLVGNLSNFISYETHVVEHRDASPAGRVMRRRAWLWSAGNLRNCQGPRAQP

SEQ ID NO: 38510 - protein, 59 aa, Homo sapiens
KSNIKICLLLILMLPAQQVHQRARMNYGCHECPCEAVGKPWLDCEGYLKSILESTRSSM

SEQ ID NO: 38511 - protein, 34 aa, Homo sapiens
MTQSGRRGLGLQVSALASVGPHSFASFAPCLSFL

SEQ ID NO: 38512 - protein, 128 aa, Homo sapiens
VNICGCPLLFFLLFQLLLLLPLPSRSRKPPTQLTLAQLQTVSSAQLYLAPRAPLRHWTHRRVFYFLQSCIAVHIFVPATSLCLWSALQPRKLLLELRPSAPAGQWRSPPSSRAQPLLLWADDAEDALL

SEQ ID NO: 38513 - protein, 49 aa, Homo sapiens
VTQPMTLLLLLKSPYLAFLKFQGSLCATYHSPLTLVPSGPIVDGCMGAM

SEQ ID NO: 38514 - protein, 35 aa, Homo sapiens
LLFLQLYQHILCPFTNPFLHVFLLMMVLEKSGLFH

SEQ ID NO: 38515 - protein, 45 aa, Homo sapiens
LNILRTGIFVSALLMYPQQPELPDMPSSGDDFTFDRSCPSKANMQ

SEQ ID NO: 38516 - protein, 19 aa, Homo sapiens
MATLYLLIYSFCIYQAQFW

SEQ ID NO: 38517 - protein, 25 aa, Homo sapiens
LNILRTGIFVSALLMYPQQPELPDI

SEQ ID NO: 38518 - protein, 63 aa, Homo sapiens [sequence omitted]

SEQ ID NO: 38519 - protein, 52 aa, Homo sapiens
LGIMRPSSRAPVLLLLLLLRLLLRPERLSSRQAAALLSRAQTGPSQRDLSDS

SEQ ID NO: 38520 - protein, 38 aa, Homo sapiens [sequence omitted]

SEQ ID NO: 38521 - protein, 32 aa, Homo sapiens
VFIDTIIALSIFLFIFIWGGGRWMQKLKIVML

SEQ ID NO: 38522 - protein, 46 aa, Homo sapiens
LPPPPLLLKRQFLQVAGEQAQENAAILGVVLFISFLPNRVWIHFRG

SEQ ID NO: 38523 - protein, 27 aa, Homo sapiens
LDLPLFLILIFVLLLSGIGFLKNLDPF

SEQ ID NO: 38524 - protein, 40 aa, Homo sapiens
LTHVAYIKPLCVVCGFIHLGTLFPLPPLGMRLYTGSTRGQ

SEQ ID NO: 38525 - protein, 35 aa, Homo sapiens
MGQTRILSLSKLRKSPATFVVHNVGLEKWKTPILE

SEQ ID NO: 38526 - protein, 38 aa, Homo sapiens
LCYSFALLSLSLELKASWSEARTIIPSLSTLISGCSNE

SEQ ID NO: 38527 - protein, 54 aa, Homo sapiens
MITQLECKPQYFTESLALSMGPATGIKLFSSPAVTSSTSFQIYLTLNLSFVTSM

SEQ ID NO: 38528 - protein, 62 aa, Homo sapiens
VGQYTGLLTLFLAPQTTLYLPHCHPATLMGLHSKGRISSELFFFLKKKKKKPLVIQALSFNR

SEQ ID NO: 38529 - protein, 26 aa, Homo sapiens
LRVLLSTWRFMHIATAIIIIIPIQGK

SEQ ID NO: 38530 - protein, 27 aa, Homo sapiens
LCPHQMLNLLSTLIFHFTFIRTVFVSG

SEQ ID NO: 38531 - protein, 36 aa, Homo sapiens
LCPHQMLNLLSTLIFHFTFIRTVLQRGHPLLKNRRT

SEQ ID NO: 38532 - protein, 33 aa, Homo sapiens
LCPHQMLNLLSTLIFHFTFIRTTGAVAEMSHGR

SEQ ID NO: 38533 - protein, 24 aa, Homo sapiens
MRFFCLQQRKGKKTPQGLRWLLHE

SEQ ID NO: 38534 - protein, 50 aa, Homo sapiens
MVSCLLRTARQRCVCEDVLHLLLCASQLLLLKQLSLLFGFLRLLASERHL

SEQ ID NO: 38535 - protein, 65 aa, Homo sapiens
MLIMISSLRCINIFVLFAKITNHLCFYSFSKWCQRHTCIFPNDSTSLLFTWLISLVYRGFEKKNM

SEQ ID NO: 38536 - protein, 67 aa, Homo sapiens
LTGQKCFWYFGVRTSGVQNLLWILKNSLLPQFFICNSMALSMASLYLSSSFLRLLEPLSELQKRSQG

SEQ ID NO: 38537 - protein, 55 aa, Homo sapiens [sequence omitted]

SEQ ID NO: 38538 - protein, 95 aa, Homo sapiens
LFLYTHWQAWCRLPRPPARQPGKVGYRAKELSSDTGRGASSHRETKQEPFPLASSSALPEGLLFALSLLKLCCFYFSPFCLGFMRALLSLRGKRD

SEQ ID NO: 38539 - protein, 24 aa, Homo sapiens
LPYSRHTLSSLGLLWPLTSLSSAF

SEQ ID NO: 38540 - protein, 22 aa, Homo sapiens
MLLLGLEGLLFMLFNALSNVFF

SEQ ID NO: 38541 - protein, 21 aa, Homo sapiens
LSSVLLLLYPLSLLSCPLLLS

SEQ ID NO: 38542 - protein, 98 aa, Homo sapiens
LKACLGWRSISKVNHSHTWHVSVRYWQSSVPLLSGLSTGCLSVLMTQQLAYSRVSNSRESKAEATKSLCLKSCTIFSTSILLIILISLFSLGGNCTRA

SEQ ID NO: 38543 - protein, 101 aa, Homo sapiens
LLRASALAFSLSGFSGSRWCYTARIDIFRERDIFKTKPTISCPLTPQNPLPEEERSLGRSGRAPSAGLFAEAAPLTVGPALRCVHIRLFPILLFFRFSTCK

SEQ ID NO: 38544 - protein, 31 aa, Homo sapiens
LRPYAIHKDSLGFWFGVVSALCALWTQNQST

SEQ ID NO: 38545 - protein, 92 aa, Homo sapiens
LSAAPGKPQPLPGGEPASCLHCPRSTHRHLPGVWLTALSGPLSFLTFCVASHFHQHSMGSRPTARWGHGPQLGGDCLLAQGPVFCHSGCKIS

SEQ ID NO: 38546 - protein, 44 aa, Homo sapiens
LGLRVLTRGRAGRLGVPHLLALPSLPSPALQSQPSWVPATTAAG

SEQ ID NO: 38547 - protein, 24 aa, Homo sapiens
LKQPRRRLYWLSALATAVVMVTGP

SEQ ID NO: 38548 - protein, 12 aa, Homo sapiens
VGFSVFLFFYPK

SEQ ID NO: 38549 - protein, 78 aa, Homo sapiens
LLLLMQSRPVASHDTPCLLCCFLLASFLRGEGTELSRWEDFSFLSVFRSRVGWGGRLGIRDHITLNGCYLNNYFLVWL

SEQ ID NO: 38550 - protein, 106 aa, Homo sapiens
LDDFRNMAKNLYFPLLSCLMSMTLERQSVGAEIFVVHRRFVDIFSQGKTRARVSGGRASSRPRVAEKAQGKSAQPPAATGRKRRIFPHSALGAVEFLRHVHPFGLI

SEQ ID NO: 38551 - protein, 15 aa, Homo sapiens
MAPVPLTRIHMGLQF

SEQ ID NO: 38552 - protein, 55 aa, Homo sapiens
LPCLAVFHGLPSAPLLFPSTQPASSVFQAQLGVSSGKPVWMPLTPDWFGNPQCST

SEQ ID NO: 38553 - protein, 12 aa, Homo sapiens
LRRGDARLLLLL

SEQ ID NO: 38554 - protein, 68 aa, Homo sapiens
MRTSRISFVGKESLFKDVHWPSREELLLQLKIGLELTGDLALDGRKRCSCRFGSSHTGGRGKLAVCSS

SEQ ID NO: 38555 - protein, 32 aa, Homo sapiens
LLLPLLLKFFLTLPTFPSFPSRRLRLPTPPPG

SEQ ID NO: 38556 - protein, 96 aa, Homo sapiens
VPGRGGDRRKVLLRILSRAEKNSRGYMWAAFPPSSFFPSQTNNQKVFGDGKNTSGKRQITVFPTPSQVLFALLFPVSLQFIDFIVVFCLFGARTEM

SEQ ID NO: 38557 - protein, 107 aa, Homo sapiens
MRAVDYFLSLLHLPHTRAAFCSSFCQVPRSLETSLLLVWIPELLSEARGKYLSAENAKTNHLTMAILLSMVIPTLMVPRWLQQFQPCYPNPPTSGGICLFNLHLLQM

SEQ ID NO: 38558 - protein, 42 aa, Homo sapiens
VAFPHSAALRGTRTSSLTSSSWATLSSSPLTGTISLMLLKIW

SEQ ID NO: 38559 - protein, 66 aa, Homo sapiens
LPTLTPPLSSAWYGKQGARWSLIVLSSQQSQLSPHVAAAFAAHAACCFLFLIFPNCFLEMLVSNFS

SEQ ID NO: 38560 - protein, 71 aa, Homo sapiens
LRRLWLHFFGWWVMPGVGWAQALKSPFCLVVLHLALPGLWCRLGVDLSSVIYVCCLAPRWLCGQVLAKDII

SEQ ID NO: 38561 - protein, 42 aa, Homo sapiens
LLSCNYGAPQSLRNSLPLAGSPTGAMCTLLVFKQFSGFIYLF

SEQ ID NO: 38562 - protein, 29 aa, Homo sapiens
MQWTAPLACSTRVILQSLSALDNGTLSQK

SEQ ID NO: 38563 - protein, 84 aa, Homo sapiens
LKKQLLEGLNKGNMQLCSNILIMYCSAAHITVHHHLERLIRTEGEFSLTLLSVILFYLIFPSPPHVISHGFGYDGKEECRGGEK

SEQ ID NO: 38564 - protein, 82 aa, Homo sapiens
LGWAGPGAGRPGRPRGREAGRGPPRAPEPGDAGLGRGHARPPLDTPAPHARPRSTGRLERGERRPQDIPPPPPPKSDSGGEN

SEQ ID NO: 38565 - protein, 31 aa, Homo sapiens
RCSWASVLPLCSPWASPTSTTTCGGRTPRSI

SEQ ID NO: 38566 - protein, 105 aa, Homo sapiens
LTSFSDRDLVAGSRKSPALLPDPFLLSLAGFLLPASLASISQPRDSLLYSRAPVARHPEPSHLQPSVFCPSLTSEGPALSFSPESPRFLSLPCLPALDSQIPADV

SEQ ID NO: 38567 - protein, 37 aa, Homo sapiens
IQKKSPWRQVQPRLGLALTVLNAVVLSVSSMLVNCTT

SEQ ID NO: 38568 - protein, 26 aa, Homo sapiens
MERYQFHSPDLYILEMLFSWETLNKL

SEQ ID NO: 38569 - protein, 30 aa, Homo sapiens
MVLLTFWKVSLSSSGRISISLSNSHLPFSP

SEQ ID NO: 38570 - protein, 16 aa, Homo sapiens
MKWLLVAAWRTPAALL

SEQ ID NO: 38571 - protein, 13 aa, Homo sapiens
MEECWTSFKNGLF

SEQ ID NO: 38572 - protein, 38 aa, Homo sapiens
MTHSTYQKYFPQLQDLAFKTGRFLPHVLLGFADLIVSI

SEQ ID NO: 38573 - protein, 27 aa, Homo sapiens
MPPLSCSLATFLSEARGASWTMQMNFG

SEQ ID NO: 38574 - protein, 46 aa, Homo sapiens
MNPHFKSSCLLEVALPVTSLHFSIHGCYSRKSSFLKHISRHMMRLM

SEQ ID NO: 38575 - protein, 60 aa, Homo sapiens
RCGTHWLPTKAPIRRLPHCKTTWLSLCTAMSPLTTEIWALRRGNSSASWSRAASGGRRSP

SEQ ID NO: 38576 - protein, 14 aa, Homo sapiens
LPVFLIAALLPLWM

SEQ ID NO: 38577 - protein, 30 aa, Homo sapiens
IVLKLLQLSEIVYMSSFFLHWLGIKLNLFQ

SEQ ID NO: 38578 - protein, 19 aa, Homo sapiens
LAAPRRALFFRLGMLLTAG

SEQ ID NO: 38579 - protein, 34 aa, Homo sapiens
ITQSAVIVISMASSLHSSSCFQPPKPEHCLASNH

SEQ ID NO: 38580 - protein, 45 aa, Homo sapiens
RLPKLAGHFAAVCGGAASGMPKPKAGRGINYKWSRLHPFEPRTCL

SEQ ID NO: 38581 - protein, 22 aa, Homo sapiens
VCAFFFFSFLVVCTSLGMEGNK

SEQ ID NO: 38582 - protein, 16 aa, Homo sapiens
IFPLALCLYFCFVFDS

SEQ ID NO: 38583 - protein, 30 aa, Homo sapiens
ILTTLLLCSLGMLLCLCIWSLFGATVDRHL

SEQ ID NO: 38584 - protein, 23 aa, Homo sapiens
MPCTGLAASVSPVSSQDGPDSLR

SEQ ID NO: 38585 - protein, 52 aa, Homo sapiens
LRLLLPLSKVPGLLPVLQPSMASLSLQIISFNSLIAPVSLDGFLLPTTKNPN

SEQ ID NO: 38586 - protein, 23 aa, Homo sapiens
ILLNCFLRFFLCMHSFSVPFCPF

SEQ ID NO: 38587 - protein, 61 aa, Homo sapiens
ISVSFLAMFFCRNYGSFWFYVLSKMLSFFICLLIFVHLLLLSFLISDWPPPTGSAEHKYSG

SEQ ID NO: 38588 - protein, 37 aa, Homo sapiens
IKGVLCVPGMVLLWCPWCDPSPAGNSLREVGPLHQCC

SEQ ID NO: 38589 - protein, 46 aa, Homo sapiens
LISHLLSPITSILFPPVSPSPPQFPPCPSFPPSSPSPGHFANLWLL

SEQ ID NO: 38590 - protein, 10 aa, Homo sapiens
VVYFIFFILF

SEQ ID NO: 38591 - protein, 56 aa, Homo sapiens
LRNPARKDIGGGLALKLLFKTRKRRRKRKKRKMLGNIYLTCSTARTLASCCYSCKY

SEQ ID NO: 38592 - protein, 69 aa, Homo sapiens
LVLLGRPPVGMGLSVLLPLCLLGPGRFTSGQKPLDTPGLGAAVLSVRKAGLKMRSHLTPSVCTVPSPGS

SEQ ID NO: 38593 - protein, 19 aa, Homo sapiens
LIVLFFLLAVHFGGYYKEI

SEQ ID NO: 38594 - protein, 41 aa, Homo sapiens
MIDEVKQDSLALPGLCGDREDLEIKETLVTWKFMLRVVTSQ

SEQ ID NO: 38595 - protein, 11 aa, Homo sapiens
TTLLLSLCTCV

SEQ ID NO: 38596 - protein, 15 aa, Homo sapiens
MVFLIFLFQSLKQLI

SEQ ID NO: 38597 - protein, 11 aa, Homo sapiens
VLLIWTLKWAL

SEQ ID NO: 38598 - protein, 9 aa, Homo sapiens
IYDWLLGLL

SEQ ID NO: 38599 - protein, 38 aa, Homo sapiens
MMSPSAACPVLGQSCPPRCPSAMRTSWTLWSRAAPVPL

SEQ ID NO: 38600 - protein, 13 aa, Homo sapiens
VWGPVTIWSFVLC

SEQ ID NO: 38601 - protein, 80 aa, Homo sapiens
LALLGVLRRNGCWFLLGVGPWLVGPPVFCFSPLSCCLVKRKPWRSESPGTRKLMLKIRRRSTWQAQSAFLRPLLQPPSPD

SEQ ID NO: 38602 - protein, 14 aa, Homo sapiens
RLMKEESPVVSWRL

SEQ ID NO: 38603 - protein, 28 aa, Homo sapiens
TARLKSLQWLTKLILVRVTLATDLSMEG

SEQ ID NO: 38604 - protein, 45 aa, Homo sapiens
MPVGIFCHMACTIPSRAAGGREIWMAQRTGCTTEFLTRRRTCFLT

SEQ ID NO: 38605 - protein, 10 aa, Homo sapiens
MPQTCEKWNF

SEQ ID NO: 38606 - protein, 33 aa, Homo sapiens [sequence omitted]

SEQ ID NO: 38607 - protein, 61 aa, Homo sapiens
LSQSGVLAPLLSSSPSEPASPSAPLLPRLCTLFVVGWPKGMSCFHQRHSAKGKLRHWKERE

SEQ ID NO: 38608 - protein, 31 aa, Homo sapiens
ICLLMKIHLCMVIFLNFMAQKEQEKQKCFIT

SEQ ID NO: 38609 - protein, 17 aa, Homo sapiens
LTRAQLMFVVLSLSVCQ

SEQ ID NO: 38610 - protein, 12 aa, Homo sapiens
RIIRNVLIAFSL

SEQ ID NO: 38611 - protein, 38 aa, Homo sapiens
LSPVPQQQVVLIALFVQCFGLGPSAFPRSSTLHPAQPC

SEQ ID NO: 38612 - protein, 9 aa, Homo sapiens
ILFSALILR

SEQ ID NO: 38613 - protein, 16 aa, Homo sapiens
VAQFFLALLLQVNWWI

SEQ ID NO: 38614 - protein, 49 aa, Homo sapiens
ISMLCKRYCPSNIFHHSLELFRLPFELRGPWLCCSTLILSTAFCITFEV

SEQ ID NO: 38615 - protein, 7 aa, Homo sapiens
ILETGSG

SEQ ID NO: 38616 - protein, 53 aa, Homo sapiens
LEGSCRPQVGEEERRKAVRCLSWKPTMSCDEIQATELCFSPKQQMESSFRTII

SEQ ID NO: 38617 - protein, 21 aa, Homo sapiens
MERGILWMLVLLNPLPAGPPG

SEQ ID NO: 38618 - protein, 22 aa, Homo sapiens
KNFLHQIFIFLSLPSRATCTSY

SEQ ID NO: 38619 - protein, 26 aa, Homo sapiens
RFYRITLTKVPWSFMSQHILLFLFLQ

SEQ ID NO: 38620 - protein, 19 aa, Homo sapiens
LASLLNIYALLNLLWTNHQ

SEQ ID NO: 38621 - protein, 16 aa, Homo sapiens
VRGLWLLFLKIIYRSN

SEQ ID NO: 38622 - protein, 14 aa, Homo sapiens
KICFSITCAFTLST

SEQ ID NO: 38623 - protein, 35 aa, Homo sapiens
VMLLLIYLGSWLAGEAEPLLKAWLPRKICSVQPRA

SEQ ID NO: 38624 - protein, 23 aa, Homo sapiens
LCMLLTVSLFSSQLRVKISPSGQ

SEQ ID NO: 38625 - protein, 42 aa, Homo sapiens
MRKGCRKFCCLHMWLQLRHWSSPASPEGLKNKYEFRFHTSIN

SEQ ID NO: 38626 - protein, 15 aa, Homo sapiens
RRTQIIRNKVWLLIL

SEQ ID NO: 38627 - protein, 10 aa, Homo sapiens
RVSIALPSLP

SEQ ID NO: 38628 - protein, 13 aa, Homo sapiens
IAADTAAVWLGLL

SEQ ID NO: 38629 - protein, 71 aa, Homo sapiens
LLSPCLGTAGTCLATSSGGPRPPSSSLPSFLLPCPISAAPRSLRRAPWLLGRAVVGWPRPTPYGGGSSPPF

SEQ ID NO: 38630 - protein, 34 aa, Homo sapiens
VVMITWSMCGLVLLERVAGFLCRHSPSIKGLSRP

SEQ ID NO: 38631 - protein, 20 aa, Homo sapiens
VDGRDIEEEKSARPEMCMES

SEQ ID NO: 38632 - protein, 12 aa, Homo sapiens
MWLCSLMWIAWI

SEQ ID NO: 38633 - protein, 22 aa, Homo sapiens
LDLLFLTSRWLAIIPLSGSWTL

SEQ ID NO: 38634 - protein, 42 aa, Homo sapiens
MCPNSFNEDQPMVVLCCYLCFWGFCSDFFCGICIRSRYNPRA

SEQ ID NO: 38635 - protein, 14 aa, Homo sapiens
IHCLNVLVTALLLE

SEQ ID NO: 38636 - protein, 40 aa, Homo sapiens
KAFFPCYLCRYFIFLAFLEITTSCGSVSGNFTDLSPPSHK

SEQ ID NO: 38637 - protein, 39 aa, Homo sapiens
MIPESKREELGFANLVALSVSCFSKAAVQKERRYQEGTC

SEQ ID NO: 38638 - protein, 38 aa, Homo sapiens
LARLLVFVLFQAALSSGVTRCQSAEKFIVQHHHKLTME

SEQ ID NO: 38639 - protein, 35 aa, Homo sapiens
VTFVRPANLIKILLESALLVSYLCQISSWETAVTT

SEQ ID NO: 38640 - protein, 39 aa, Homo sapiens
ILLDKWTSIYCAFTAAITIASSKTVSSAPSSGWMGNCSC

SEQ ID NO: 38641 - protein, 36 aa, Homo sapiens
MAGAMGKEHNICMVYLKGIGCLCHFSALARKWSLKP

SEQ ID NO: 38642 - protein, 12 aa, Homo sapiens
LAFRALVLLDLL

SEQ ID NO: 38643 - protein, 57 aa, Homo sapiens
MPSLNLLIDYFSCSAAWTKEKFCRSSWMRPKARKLLKRSLPMNFWVLLCHPGWSAVA

SEQ ID NO: 38644 - protein, 56 aa, Homo sapiens
MRRCRKLVLAYIPVSLCSITAVTPTVRLCSMGPTSYCEQSETSRWERSSPSATWIC

SEQ ID NO: 38645 - protein, 13 aa, Homo sapiens
TKLALKSVLLMLQ

SEQ ID NO: 38646 - protein, 29 aa, Homo sapiens
IIGMPLPVLLCLTLPMPLPSATARGGNRT

SEQ ID NO: 38647 - protein, 58 aa, Homo sapiens
LSPALLGSSGRKHVLQRLGFVSGSGIATAASVTPGDQHSRSLGTYDRGLRQQRDSEHL

SEQ ID NO: 38648 - protein, 16 aa, Homo sapiens
REVRLLLRVLTAGVFS

SEQ ID NO: 38649 - protein, 48 aa, Homo sapiens
RAWPLGLLCPLWVPAAVLRPTSGSYPASTARGHTASCHHWPKRSSWPR

SEQ ID NO: 38650 - protein, 26 aa, Homo sapiens
MKAEVCAFFFFSFLVVCTSLGMEGNK

SEQ ID NO: 38651 - protein, 16 aa, Homo sapiens
KRFQFGWCSLWLHSFL

SEQ ID NO: 38652 - protein, 30 aa, Homo sapiens
LILALLHILCNLGPLSALRAGREEVLFGPR

SEQ ID NO: 38653 - protein, 61 aa, Homo sapiens
MRSTLAASIPTISSQGSSGHPFTKDWIVLWKSVLYMGITPSSFRFTQKRGSTVMGNWAMNQ

SEQ ID NO: 38654 - protein, 39 aa, Homo sapiens
TLAVMIGPQRASVSILWAFWRSCWMLSTETSTRNKTRTT

SEQ ID NO: 38655 - protein, 45 aa, Homo sapiens
LVMKSLTATSSMKVLLPRTFWTRKLMKFLLLMIRMPSMWQTWETF

SEQ ID NO: 38656 - protein, 40 aa, Homo sapiens
ILRPSCRQSLMPAVFLTWGLRLVSACICLILAVAFLDLRM

SEQ ID NO: 38657 - protein, 32 aa, Homo sapiens
MWVIGCSLKTWALTLLLLPLRSMASRGRRSTM

SEQ ID NO: 38658 - protein, 31 aa, Homo sapiens
RHLLLFLLWQMLFLQLWCPQPPARALLLLFL

SEQ ID NO: 38659 - protein, 13 aa, Homo sapiens
IFQIVIIFHLWIC

SEQ ID NO: 38660 - protein, 17 aa, Homo sapiens
VSLILFQLCLWLPGLYL

SEQ ID NO: 38661 - protein, 15 aa, Homo sapiens
LYSFYCLLDFCLVFL

SEQ ID NO: 38662 - protein, 15 aa, Homo sapiens
MRQHLLIMWSACSFF

SEQ ID NO: 38663 - protein, 32 aa, Homo sapiens
IQSFQCLHLPVLLLGMPSCWVCSLSEVSEKIH

SEQ ID NO: 38664 - protein, 20 aa, Homo sapiens
KVNRKISRALAELHLLAFLA

SEQ ID NO: 38665 - protein, 19 aa, Homo sapiens
MGLEPGLKGRQSDGWRTWN

SEQ ID NO: 38666 - protein, 72 aa, Homo sapiens
IGLSSALPVLHLGSALVLLGSKLLAFTFDPKHLKPWATHGGREHHHPSVHTSISFSSWCWLVFLTSVQVLST

SEQ ID NO: 38667 - protein, 34 aa, Homo sapiens
LWGRTPGGSARPWRQETALLRFCLGSLLFALDGS

SEQ ID NO: 38668 - protein, 23 aa, Homo sapiens
MGHTAVLQIFSLISLKATQQLFM

SEQ ID NO: 38669 - protein, 17 aa, Homo sapiens
MDLWWWFSNWNIIFTCL

SEQ ID NO: 38670 - protein, 11 aa, Homo sapiens
VRYFFLQVWLF

SEQ ID NO: 38671 - protein, 16 aa, Homo sapiens
IWIKRFLVSIPFISCV

SEQ ID NO: 38672 - protein, 99 aa, Homo sapiens
ITCSIGWLRSSQKKMLSLFPQLSLCAVAPFSSSNSRTLMISQNRSTSFFASGKNRFQLSPTNFASWLDISARLAGVILQKSSNSSGKIKCSLNHSSVLM

SEQ ID NO: 38673 - protein, 16 aa, Homo sapiens
RIPRMMNAQWLMHMLL

SEQ ID NO: 38674 - protein, 24 aa, Homo sapiens
ISILFCLTTWMATSMNLMDECLFR

SEQ ID NO: 38675 - protein, 49 aa, Homo sapiens
VPRPLDSRPAEPRARLPSSSIAFYDFFCACIHFLFRFVLFKAVAAATAA

SEQ ID NO: 38676 - protein, 16 aa, Homo sapiens
KFSRTTMVKRVLLLTV

SEQ ID NO: 38677 - protein, 12 aa, Homo sapiens
VMLSGKRMILLL

SEQ ID NO: 38678 - protein, 23 aa, Homo sapiens
IKPFRVMPACLLMVCKTITFLGS

SEQ ID NO: 38679 - protein, 16 aa, Homo sapiens
IKPFRVMPACLLMQLF

SEQ ID NO: 38680 - protein, 37 aa, Homo sapiens
LDLFVMTIWQLFAVLIVLFAKSREISTEGEPCVLSKN

SEQ ID NO: 38681 - protein, 59 aa, Homo sapiens
MAALGTRTSRGRPGLREQMPQQDRSSAAFDDLEARQHPLYCLLWVVSESQTCLDSRKRN

SEQ ID NO: 38682 - protein, 28 aa, Homo sapiens
KLMDISILIMSVWYLYRMEKKSQVHVPV

SEQ ID NO: 38683 - protein, 26 aa, Homo sapiens
VRGLNLRLGWLFSACCGGTAVGFCWV

SEQ ID NO: 38684 - protein, 27 aa, Homo sapiens
MLSRVVSKLLSSSDLPASASQSAEITE

SEQ ID NO: 38685 - protein, 41 aa, Homo sapiens
LLLLRLAGISAGAAAAAAAYAPWSIASWGPGRTELPGCFYF

SEQ ID NO: 38686 - protein, 78 aa, Homo sapiens
LLLLRLAGISAGAAAAAAAYAPWSIASWGPGRTELPGCGMRPWSFFVLRCRYGNIAVVSRAMSIVSQRPKLWIGCMSC

SEQ ID NO: 38687 - protein, 28 aa, Homo sapiens
MQNEMCQWSRAVLSLVMSYTMCLTGAGH

SEQ ID NO: 38688 - protein, 83 aa, Homo sapiens
IPTRRFLGRGPNKKREEMEITSPDLAFLSLFLFSPLPSDDWRVKGNPERGGEQRFEKMQECVWRRVKLPFKLWPPGTRCSAAG

SEQ ID NO: 38689 - protein, 102 aa, Homo sapiens
LRHHPCHCRALAALLTAWSHALRRATGGRWVTSIRAAAARRREKASKKEEWEEEGKRRRRKRRRRKRGAQRIQVSRREVNTKNHVCRAAGPVHDPGFGVGHL

SEQ ID NO: 38690 - protein, 39 aa, Homo sapiens
LLCQNTCSSTGWAKMCLMPASALVPATWLRWRSSSRVST

SEQ ID NO: 38691 - protein, 52 aa, Homo sapiens
RLDMLTVLSPPAFGLGFSSLFTCRLSHSLPFPQHHSPRKSQCFPPIILSADP

SEQ ID NO: 38692 - protein, 20 aa, Homo sapiens
ILQAFYWPVIFLCVPYRPPP

SEQ ID NO: 38693 - protein, 24 aa, Homo sapiens
TVTAIASCMPLLSTCGAFRTQTWY

SEQ ID NO: 38694 - protein, 51 aa, Homo sapiens
MGSQSQKVFLRPASSPRVIIPSSRSVTSPSSLLLMRFMTARWSTGAWTSLF

SEQ ID NO: 38695 - protein, 31 aa, Homo sapiens
KESPSPLSAAWLAAAASSVFLASFMRKLAEC

SEQ ID NO: 38696 - protein, 24 aa, Homo sapiens
RVRTRGGGVNAAPGNGRSTGLDQA

SEQ ID NO: 38697 - protein, 13 aa, Homo sapiens
IVYQGQTLCLWLL

SEQ ID NO: 38698 - protein, 29 aa, Homo sapiens
IASTLSFLLCTQMGWLDESSSWLSKECTV

SEQ ID NO: 38699 - protein, 35 aa, Homo sapiens
KKSRSVRRRRLGKVFLCLGSMEAASRHLPATLMLL

SEQ ID NO: 38700 - protein, 36 aa, Homo sapiens
RTAGSPCRLRQMTMAASPWTVTCSVGSATLLEPRPE

SEQ ID NO: 38701 - protein, 38 aa, Homo sapiens
LIFHSSFLCLVLTVFVYFKGEKTRGTKPAGSIHHRGWF

SEQ ID NO: 38702 - protein, 13 aa, Homo sapiens
LFYITFLIWEMKF

SEQ ID NO: 38703 - protein, 18 aa, Homo sapiens
VAFLFRRFPSEYSKTKIK

SEQ ID NO: 38704 - protein, 32 aa, Homo sapiens
MLTPALRHLSGSILLSLAYMDTSAHRHVTAGC

SEQ ID NO: 38705 - protein, 22 aa, Homo sapiens
KLFQLLTWLSMKSSLTVTLTQS

SEQ ID NO: 38706 - protein, 38 aa, Homo sapiens
MLVWLPWASAAARAFCAISVRPMAGCGQASPCWVPGCC

SEQ ID NO: 38707 - protein, 27 aa, Homo sapiens
MTQKLSSWELACLALLWQLCFPEMEER

SEQ ID NO: 38708 - protein, 27 aa, Homo sapiens
LNARPLIPFFPPLSLGLLIKARPFPQP

SEQ ID NO: 38709 - protein, 16 aa, Homo sapiens
IWKMILDLMCLMMAHS

SEQ ID NO: 38710 - protein, 69 aa, Homo sapiens
LTALFLLCRSAASLPRVPRAQAANTRYPWRSEVGCCTDSSAKCPPTPGAGCTRSWPRAQRRRRRRRRRG

SEQ ID NO: 38711 - protein, 33 aa, Homo sapiens
MSCENAHALPSTPPFFLFFLFPFFPLVPSPSSL

SEQ ID NO: 38712 - protein, 29 aa, Homo sapiens
ISLLGQDAVLAGSSISTARILSGNTEVVL

SEQ ID NO: 38713 - protein, 30 aa, Homo sapiens
ILHFSRMNPRSIPWTLLTLSKASTVPTRLR

SEQ ID NO: 38714 - protein, 40 aa, Homo sapiens
LRLQEQLHWHGRILFQAGLLLCSTVLVEEFYPVYCLQSLH

SEQ ID NO: 38715 - protein, 18 aa, Homo sapiens
ISLDSAYLMFSILEVSLL

SEQ ID NO: 38716 - protein, 15 aa, Homo sapiens
KYTSFKEMLPLILML

SEQ ID NO: 38717 - protein, 17 aa, Homo sapiens
RAELGTLWAGLLPAWTL

SEQ ID NO: 38718 - protein, 23 aa, Homo sapiens
LSSGAVLLVLPLGMTAQHSRRSG

SEQ ID NO: 38719 - protein, 40 aa, Homo sapiens
MRRRGALCAGTTAVFRRWRWTQAAWTTVAGRMGSVYGQLP

SEQ ID NO: 38720 - protein, 16 aa, Homo sapiens
RTLRLTVFSLLMMSSC

SEQ ID NO: 38721 - protein, 10 aa, Homo sapiens
LPTPERKAKE

SEQ ID NO: 38722 - protein, 23 aa, Homo sapiens
IDCEAKCCEGNQRQLRCRGSNSE

SEQ ID NO: 38723 - protein, 37 aa, Homo sapiens
MERMSRRRCTARSKTDTVLGPRAHVPGRRGSSINDQP

SEQ ID NO: 38724 - protein, 27 aa, Homo sapiens
VRRLGPFLVFSPRVLLCHPGWSAMASS

SEQ ID NO: 38725 - protein, 46 aa, Homo sapiens
LQVRVFIMWVTVMMSNAFAVMVDSGVGNLEMIHGFNMPSGFQGVST

SEQ ID NO: 38726 - protein, 17 aa, Homo sapiens
IGAIWMVLLPITWCLRM

SEQ ID NO: 38727 - protein, 15 aa, Homo sapiens
KRPPTTLLLSLCTCV

SEQ ID NO: 38728 - protein, 12 aa, Homo sapiens
VSSFWIALGFLC

SEQ ID NO: 38729 - protein, 30 aa, Homo sapiens
MTGTVCWHLVWWFSSCFRIQSLWMMTASKW

SEQ ID NO: 38730 - protein, 117 aa, Homo sapiens
LIPYISRYISGGSSGLEMTDLLSPLPAILGPRGQERPGIQGVPQLSFTRIYRPALPTSQHPAWQRNGTEDGAAGRYQHFRNCDRILLRCQGWSALVQSRLTANSASQVQVILLCQFL

SEQ ID NO: 38731 - protein, 32 aa, Homo sapiens
VRGRNELGAAAVAAGAVRAAPALGAAAALPEG

SEQ ID NO: 38732 - protein, 74 aa, Homo sapiens
MRLGPRRRAACGRVAFGSSTFALVPVFAHLSILQSLVPAAGAASPVAISAQHLCYSHVTPGDPGAGAGQGPAPS

SEQ ID NO: 38733 - protein, 17 aa, Homo sapiens
LVRRNERRRENREVLPQ

SEQ ID NO: 38734 - protein, 33 aa, Homo sapiens
TVWSCVISSCVALSSLTVRGRSWCWRTWRTPAC

SEQ ID NO: 38735 - protein, 18 aa, Homo sapiens
IQKVRTTPSGKASRDRRQ

SEQ ID NO: 38736 - protein, 56 aa, Homo sapiens
MLIDGSDSHQIFPCLLCKDSRESRAKPCHSSIRRAKSFIHAEEQADHAATALVFTF

SEQ ID NO: 38737 - protein, 71 aa, Homo sapiens
MFLGERPEVLQEGLQLGSAVGARSPRDHRTCKRPPAPPPPRRSEQLDSASSNSGGTLKLRDRISPCWPCWS

SEQ ID NO: 38738 - protein, 42 aa, Homo sapiens
MTSPSPGATSPKGAEMPFRSSTMPRDNPTLTRWGPSKSASSG

SEQ ID NO: 38739 - protein, 90 aa, Homo sapiens
MRGARCAWISCRSRSAWTAATASASGASPSSARSRTARRAASTPVRSAGAPSGPRAFAPTGSWRAWWRACGGWGWARGPGRGDARGTART

SEQ ID NO: 38740 - protein, 32 aa, Homo sapiens
MVFHLPLSDLFFMLLLAPKKSRMAKEPRTYWN

SEQ ID NO: 38741 - protein, 106 aa, Homo sapiens
MRVPSWSRASTRNRPGSESQLEAMVSFYIPSISVRGPVPPHPRQHVYFNQHLMTQSKIHCLDPSTGGKGRRGGLPSFLPPEPYSRPWSGERVRTVPTTFPETSSRG

SEQ ID NO: 38742 - protein, 46 aa, Homo sapiens
MGLVVLKLFLRLLFKLASCSVLPIGVTRERLGGRRREYASCFFCSC

SEQ ID NO: 38743 - protein, 78 aa, Homo sapiens [sequence omitted]

SEQ ID NO: 38744 - protein, 45 aa, Homo sapiens
MPSTHLHQLGGWRCHLGRGRRAVPFRGLSLLRYILSVNLDHSCST

SEQ ID NO: 38745 - protein, 20 aa, Homo sapiens
MKPSQERAERRQVFTGSYPT

SEQ ID NO: 38746 - protein, 74 aa, Homo sapiens [sequence omitted]

SEQ ID NO: 38747 - protein, 43 aa, Homo sapiens
MHPISSETSENSQSSWGRGHKLGPGWLPYPTEVAFAIPAANRQ

SEQ ID NO: 38748 - protein, 74 aa, Homo sapiens
MKITINYHYKAVEYEVRRKTLNQYTKASQSDSSILKQFLCHFATSSQIQRLTRKPVWMNIASRSHIITSKIIEC

SEQ ID NO: 38749 - protein, 13 aa, Homo sapiens
MWKPWGENDKERG

SEQ ID NO: 38750 - protein, 31 aa, Homo sapiens
MFLGTTPVSNVRGERRRQRESLNLDAVTAQT

SEQ ID NO: 38751 - protein, 39 aa, Homo sapiens
MERKRSLQRLNKQHALWYPLFKNCELTTVVVFSFTILMA

SEQ ID NO: 38752 - protein, 59 aa, Homo sapiens
MSSSAPKSCQGRPRPAGPQEMVQSPGPDKRHWESRSPKEGWNSGKSHVPGCDEGDKMKQ

SEQ ID NO: 38753 - protein, 44 aa, Homo sapiens
MLNVALFTYKQESNYTKILENMLCKVNCDLYDGDMIKKKSTSQR

SEQ ID NO: 38754 - protein, 86 aa, Homo sapiens
MTVSLFLLLATSQSQDGCCDSGSCPNSRQQEGHGAAPASRCPCRPSLQAQEPKEESTQMWWLTPVIPPLWEAEARGSLEPRSWRPT

SEQ ID NO: 38755 - protein, 46 aa, Homo sapiens
MRHPQPCGTASKGIKKIHQDRELKERLQHIRGQPFRKTESGYRSGN

SEQ ID NO: 38756 - protein, 138 aa, Homo sapiens [sequence omitted]

SEQ ID NO: 38757 - protein, 35 aa, Homo sapiens
MPRSTAVSVGAAGATEPFAEKGCGRRRQPRQRQTV

SEQ ID NO: 38758 - protein, 6 aa, Homo sapiens
MLLLLF

SEQ ID NO: 38759 - protein, 53 aa, Homo sapiens
MAGLHPWVIFSGPLWPLLTPREQTTRTTQEQIKSRPQPPRERASILFAPRVAV

SEQ ID NO: 38760 - protein, 36 aa, Homo sapiens
MDALCIHVVTQGEYGVKRGSPKKLGVSQHLGSVQRR

SEQ ID NO: 38761 - protein, 45 aa, Homo sapiens
MSPKESYVLILSFPSVWLCQVNSEREETVTNPERPNRAEMEACPD

SEQ ID NO: 38762 - protein, 33 aa, Homo sapiens
IGSASCLTSAQDFRASWCSTALVGALALASPHS

SEQ ID NO: 38763 - protein, 27 aa, Homo sapiens
LTSAQDFRASWCSTALVGALALASPHS

SEQ ID NO: 38764 - protein, 24 aa, Homo sapiens
IIFLIYLQGSVCQMCATLLISHQR

SEQ ID NO: 38765 - protein, 46 aa, Homo sapiens
KTLKDRHFWQSCSLLAQLSFLCLDPLGPSWPWWVKTLICPVTCSRP

SEQ ID NO: 38766 - protein, 34 aa, Homo sapiens
KKVTQPSMPKGLAMINCGTQLVLSAAPAMNSWLT

SEQ ID NO: 38767 - protein, 34 aa, Homo sapiens
KRRRKRKKRKMLGNIYLTCSTARTLASCCYSCKY

SEQ ID NO: 38768 - protein, 82 aa, Homo sapiens
MAQKPFLWQRWGFGRLTMLLHSLRVLAQSRAVVYLTSNGRCVCVCVVGEWGGVLFLQCCLPGSCSSHTYLWVAGEEDQVRMQ

SEQ ID NO: 38769 - protein, 45 aa, Homo sapiens
MSNGTGLPLLAMSPTLWSCALSRLVISTSPRQQLLTWPRRMGPLW

SEQ ID NO: 38770 - protein, 44 aa, Homo sapiens
MSNGTGLPLLAMSPTLWSCALSRLVISTSPRQQLLTWPRRMGPL

SEQ ID NO: 38771 - protein, 107 aa, Homo sapiens
LCFGDALCVCVCVCMCVCVHACAAGKGRGECEGPGGRWRRARGALAPPQSNLRPRPARGRALTGAVRSCGGRHYSPAPTSPPPLPTVKEREASTTPRPKQKALWITK

SEQ ID NO: 38772 - protein, 56 aa, Homo sapiens
MVKKEISVRQQIQALLYKNFLKKWRIKREFIGMDNNIVSRAIFVHLFGTLQSYPFS

SEQ ID NO: 38773 - protein, 13 aa, Homo sapiens
MKQVTFMLLSGTI

SEQ ID NO: 38774 - protein, 40 aa, Homo sapiens
MRTYWLHSVWVLGFFLSLFSLQENILFPYLPEGGVHSIHI

SEQ ID NO: 38775 - protein, 255 aa, Homo sapiens
MGDPFLVGEIGLLAFKSAADEGQKQDQDSHVLLLEMFSKLLELLTLRHRLIEMSLESAHLARLYKELAWEMGFEEFHLYLRPVHFEFASHGDRADQPPPVFITSLLEDSGRVDRYSPTALVLAISEVDDNQIGKFSFYTKEAILKLLLHSGVENMQVTLACQAAQKNALMAAVQQVYFYCTPQGSCPANVKVSLHDREARGISSPPPANVRLPLSSFLFSLLPFSLSFSPAPYFLFPISLSSLLSFFLPFLVSCL

SEQ ID NO: 38776 - protein, 94 aa, Homo sapiens
MSFGFGFLPKNCKWCLLALLRILPLLQISEKRLECSGAHASHCDTAGEPRATAVGMTALFLLKSDLSKPLSYVWRLLGSWSTQIATANLRNGHE

SEQ ID NO: 38777 - protein, 38 aa, Homo sapiens
MTLPAFRVSKYHGLCKRFQVSMEQIVLLTINMCIIISS

SEQ ID NO: 38778 - protein, 59 aa, Homo sapiens
MTVDRKTVYLLLLMITVLPEGPGLSYSPAHLQHLTQDPRGSRNWHRCTQQRFGHCHVRV

SEQ ID NO: 38779 - protein, 79 aa, Homo sapiens
MQVQVTILFLATSCEKTNIWVTLVSTLVLLLVIVASAAIDHTRVVIQKLGFRWHLCQGLPTTPGLPATSSLPIISRSSR

SEQ ID NO: 38780 - protein, 46 aa, Homo sapiens
MILSHLLHLCAHTCEGLGPASTTALPQTQLSTSRQDGITVTGGPEV

SEQ ID NO: 38781 - protein, 38 aa, Homo sapiens
MILSHLLHLCAHTCEGLGPASTTALPQTQLSTSRQALL

SEQ ID NO: 38782 - protein, 41 aa, Homo sapiens
MGSRVLRTGKLLEAAGAGPGSPALAVFAFGRGQSLLFQVPA

SEQ ID NO: 38783 - protein, 87 aa, Homo sapiens
MSLCQRPPPFVRIGIFRLLKGLAHIRCDLFIPVVMEGHICQSLESAKAGTRFPGPQWGCANPRELGCKFVKNQHHVWQLSIGARSLP

SEQ ID NO: 38784 - protein, 76 aa, Homo sapiens
MQRMGRLRPWLCVPLRVGAGLGPNSTAAGFSLISEPRRWQSGRPGQVNPRAAGAQAPTPAQRGRKGPPPAQRAQRP

SEQ ID NO: 38785 - protein, 123 aa, Homo sapiens
MTPASGATASLGRLRARPRSRWDAAYLPAVAAVCVARASHVPNGTLRFGVCKARRTMRPLPRRIEVRTKRGPQRPAAPERSPQPRLPPSRHPSRRGPRRHLSGCSAPACRIPTGCRCPCGRPS

SEQ ID NO: 38786 - protein, 59 aa, Homo sapiens
MESSTFALVPVFAHLSILQSLVPAAGAASPVAISAQHLCYSHVTPGDPGAGAGQGPAPS

SEQ ID NO: 38787 - protein, 47 aa, Homo sapiens
MGTLCTVRSLGGACWCIPAGTGMSSKAGSSSLAPRKDGISSLPSAKM

SEQ ID NO: 38788 - protein, 97 aa, Homo sapiens
MSLPWSERACEGGAGVHQGSSYRVKPETPEALDLESEAVISQYTYEPVEDLKYLFKRQPKDKMHQLESTLKGPISHLLQKMFNWKSLPVLLTVCFCM

SEQ ID NO: 38789 - protein, 80 aa, Homo sapiens
MQKSPSSASLTLGAVDQSCSYSAILAPYSHYLLELWLRHYNRALSPLSKSWEMVIVNASPILEAPGCRGPQLAGCGGSGL

SEQ ID NO: 38790 - protein, 27 aa, Homo sapiens
MRGKPQAAVRAASAQPPQLLPWDEKAL

SEQ ID NO: 38791 - protein, 62 aa, Homo sapiens
MFLKLMATYSAAFLPVVIGLDRQAAVLNPLGSRSGVRKLLGAAWGLSFLLAFPQGSRTRNTI

SEQ ID NO: 38792 - protein, 139 aa, Homo sapiens
MFTAEKMVRRGKEEVRRKKQGNECCSVTQAGVQWHDLGSLQPPPPGFKRFSCLSLPSSWDYRLECDGMILAHGKLRLPGSSDSPASASRVAGITGMCHHAPLARLVSNTLPQVILPPLGLQTLHVMDQLTPSRSVNWFI

SEQ ID NO: 38793 - protein, 56 aa, Homo sapiens
MNVTTLVTSYRWSLTMVPTLILNSWLQAILPPWPSKVLGLQNLPGKGDMNVCNDTS

SEQ ID NO: 38794 - protein, 29 aa, Homo sapiens
MTSLFADGAEVESLGVSTEKTLTMKSQER

SEQ ID NO: 38795 - protein, 67 aa, Homo sapiens
MSRCLGLEPVTPPLRTGLQSNKYFAGQRCRPRVLRREVLSLEPTKTCPQDSLSLPDCVPPDGAFRLF

SEQ ID NO: 38796 - protein, 15 aa, Homo sapiens
MMFIQVSPRCSLDLL

SEQ ID NO: 38797 - protein, 48 aa, Homo sapiens
MTLQLTWNPPPRARGSTSSRARALPGIALSTGHFTHWAGPLTGVNKEA

SEQ ID NO: 38798 - protein, 9 aa, Homo sapiens
MLRTSLAVF

SEQ ID NO: 38799 - protein, 68 aa, Homo sapiens
MGTCTAWCEAATVSLSLRLPCSSARWPPPWRTVTSTVWSCVISSCVALSSLTVRGRSWCWRTWRTPAC

SEQ ID NO: 38800 - protein, 199 aa, Homo sapiens
MVSAQTEPREDFFGDVSPRKVWAAFLTLDACGQPSSPWMPVGSLPHPGCLWAAFLTLDACGQPSSPWMPVGCLPHPGCLWAAFLTLDACGQPSSPWMPVTWFPWGLPKLRDPKPPSNLMTRLVSEHTCVVPEPLTNPLCNPAHAFPILKGPAHRPAHVFPLPLLCPYLVGSCPFWALVWHFTHKCVLWVVSGPPPAVRG

SEQ ID NO: 38801 - protein, 17 aa, Homo sapiens
MTPHATGSTAWPPSCSG

SEQ ID NO: 38802 - protein, 52 aa, Homo sapiens
MKPKNPLSIFSIPAVPVKEYPSRVLDMCSEKVPMSPTTLEANADTGGRFHGS

SEQ ID NO: 38803 - protein, 127 aa, Homo sapiens
MGARVCSLLEENTPSPEQHSEWIGQQMSSAPRRPCFRTALQSAALLAEPQLLLQIEEPQREQKIKIIMEFRIAGHSLTFHNSQGRSTVVRGQGQEETMAKACLAGLEGAEGPLQMTLPGTHPQLAPV

SEQ ID NO: 38804 - protein, 28 aa, Homo sapiens
MARPASYGSTLRRVPGCILCLPNSASWV

SEQ ID NO: 38805 - protein, 36 aa, Homo sapiens
MLDSWRQPLKVTLRRVERALLKGLRIMCVGVSRSLL

SEQ ID NO: 38806 - protein, 80 aa, Homo sapiens
MKSNLTLLTCLTLHGGEGWKGAAVCFETVEQFCSLRKWHVTYLTKDSGLCQQQEKLYTKFLVCIREHQMKKLRKPTENWP

SEQ ID NO: 38807 - protein, 47 aa, Homo sapiens
MTQPLPDSQGPCSWTLAAMLGGSPAATQRGHDSRGPSQASINCPTRQ

SEQ ID NO: 38808 - protein, 11 aa, Homo sapiens
KSAWLMLQCSE

SEQ ID NO: 38809 - protein, 41 aa, Homo sapiens
LLATSLKWNLLVALLPLQLWCYTEKLEVSKQTREKEKHQKV

SEQ ID NO: 38810 - protein, 47 aa, Homo sapiens
TRALGTGRLRERCWGLRLSLSLFSAPPGIPLLTWVFYTPAWLPARPP

SEQ ID NO: 38811 - protein, 24 aa, Homo sapiens
ISDRYWEHKMAYQSKMAFLSFGLN

SEQ ID NO: 38812 - protein, 28 aa, Homo sapiens
IEKYLLPAFGLMLSFTWYFLSVATPMKL

SEQ ID NO: 38813 - protein, 46 aa, Homo sapiens
ISVLSRLKVTRLLLPIFRLLLAEAERLTLHNMAAWCVWCPRADESR

SEQ ID NO: 38814 - protein, 29 aa, Homo sapiens
KSSCPGSCPPVLQEAFNQTLSMPSQGPPT

SEQ ID NO: 38815 - protein, 12 aa, Homo sapiens
LFFRLGMLLTAG

SEQ ID NO: 38816 - protein, 48 aa, Homo sapiens
IPASSTTMCSEHVEEKKQLYLLVSFCLSSWTLTFSETQQSLQWSVGPP

SEQ ID NO: 38817 - protein, 14 aa, Homo sapiens
LRTHSRPAPYRGVE

SEQ ID NO: 38818 - protein, 18 aa, Homo sapiens
LFTTAHSGAHGMLAVLVL

SEQ ID NO: 38819 - protein, 26 aa, Homo sapiens
IGEGVSFFLFFFLEPVLIALNKYSLK

SEQ ID NO: 38820 - protein, 12 aa, Homo sapiens
MFLGSLMTFYTL

SEQ ID NO: 38821 - protein, 18 aa, Homo sapiens
IFSLCFFLFQFILNAYFS

SEQ ID NO: 38822 - protein, 28 aa, Homo sapiens
RFCWILFKFNLHLFLLLQERICKSTQTE

SEQ ID NO: 38823 - protein, 16 aa, Homo sapiens
LYLLIYSFCIYQAQFW

SEQ ID NO: 38824 - protein, 43 aa, Homo sapiens
VNVLLPSCGCSTACSTTASQPSSGPCSGIDSISENSTQMLPSC

SEQ ID NO: 38825 - protein, 17 aa, Homo sapiens
IAVILKVFFLPLFPSQR

SEQ ID NO: 38826 - protein, 28 aa, Homo sapiens
ISTVALMSMLTASMLDRQSFYCWIVQDI

SEQ ID NO: 38827 - protein, 22 aa, Homo sapiens
MYCFCIYLVFTLGKSFPTSSKT

SEQ ID NO: 38828 - protein, 15 aa, Homo sapiens
RPEFCKVIFKVVRDN

SEQ ID NO: 38829 - protein, 36 aa, Homo sapiens
ISGRLWLATLGSACLRLSQPPRPCVVSSWVSERAGW

SEQ ID NO: 38830 - protein, 59 aa, Homo sapiens
RCIAIYRSRRMDLLNDLALFSGPIYHIPFLLQIFLLSPFLWDLSCYIPSELTNAFTFFP

SEQ ID NO: 38831 - protein, 28 aa, Homo sapiens
RYQMGLWLLSWRVTMKIILLSSGMPLLL

SEQ ID NO: 38832 - protein, 35 aa, Homo sapiens
MRTLRCVTMTMMGCFPSLESVTWGKQGGPGKRMKN

SEQ ID NO: 38833 - protein, 41 aa, Homo sapiens
RAPPLHLEAGAITAAVWAQAMCSSGALGTAVARAWGQPVQS

SEQ ID NO: 38834 - protein, 35 aa, Homo sapiens
RKRRRKRKKRKMLGNIYLTCSTARTLASCCYSCKY

SEQ ID NO: 38835 - protein, 59 aa, Homo sapiens
IKVCAVDPRMKPAWKIPSLETEPDRGRCTGRTLSGFSNQAAILAPQVWDFWVFSWLASC

SEQ ID NO: 38836 - protein, 29 aa, Homo sapiens
LAKPLLSFLLPPLSLQLRDGPGSSVSAVL

SEQ ID NO: 38837 - protein, 75 aa, Homo sapiens
RTAELPLVLLGRPPVGMGLSVLLPLCLLGPGRFTSGQKPLDTPGLGAAVLSVRKAGLKMRSHLTPSVCTVPSPGS

SEQ ID NO: 38838 - protein, 28 aa, Homo sapiens
LMKIHLCMVIFLNFMAQKEQEKQKCFIT

SEQ ID NO: 38839 - protein, 11 aa, Homo sapiens
MIVRTTSFLLL

SEQ ID NO: 38840 - protein, 65 aa, Homo sapiens
VWWGMVPLWTCCCWSCTWRMSAAVVGGPWRTCNAYPGPWALLPPSSSGKWQNECCSRSTGCRAQS

SEQ ID NO: 38841 - protein, 73 aa, Homo sapiens
TRQHFSTSRGGHHCARRWLRRVRRSRSQTPSYQNLDPNPPIVRFPLPLERISEVPRRACLHGRDASSIKCCFP

SEQ ID NO: 38842 - protein, 40 aa, Homo sapiens
MVAGWLLQLWTSHQNMAEAKAGRQRRRQNSFIHLWLSYEE

SEQ ID NO: 38843 - protein, 14 aa, Homo sapiens
IQGYAASRFISVSD

SEQ ID NO: 38844 - protein, 51 aa, Homo sapiens
TPTLQHQWRWPPLWAEMAATRAQISIPNSLLPESGPESTHCPFSAAAGENL

SEQ ID NO: 38845 - protein, 105 aa, Homo sapiens
VRRSAMDSAAQTALASHPANIVMVCVIALMAPMNSTASPSVRTSWTLCVRTASSACSTPWSVTESSSAATGPMRMRRLQDAPKILSSTRYVMSSVSSVRMECASV

SEQ ID NO: 38846 - protein, 45 aa, Homo sapiens
VCWPITLAKNSPHQCRLPIRKWWLVWLMPWPTSITKLAFLLSNFY

SEQ ID NO: 38847 - protein, 120 aa, Homo sapiens
VAAPRRTSASRWWIWRPWAGCWVRCCCWLSLASPSLSTSTMAPGSSAAVAKLRSPSPKALTTRRSSLTTRPTGRPSPAPRTTPSPRRHRCPQSPHPPALPPQAVPLSPPQRPELAEAPRR

SEQ ID NO: 38848 - protein, 25 aa, Homo sapiens
VELQRLLVFQVFLFIQLDTMMHRSS

SEQ ID NO: 38849 - protein, 44 aa, Homo sapiens
MPSTWSLMSFCCLSLFQYCLLGGGAKAQKYKFTTTHGFIFRDIT

SEQ ID NO: 38850 - protein, 44 aa, Homo sapiens
LAAAAATPAAAAAPAAARTPSARAHPGFPERDAAAAAPVRPRAP

SEQ ID NO: 38851 - protein, 25 aa, Homo sapiens
MVAAGCVVFLASLWMLTETREFLLK

SEQ ID NO: 38852 - protein, 41 aa, Homo sapiens
KLGMTVLVSALWSISRRSLAAELSQWKLVRGTQMRNGPRPS

SEQ ID NO: 38853 - protein, 53 aa, Homo sapiens
LSCLLAVPAVPAVPALSPLLPRLLDAGDASELVIGALRRAQAPSSARGAQAAP

SEQ ID NO: 38854 - protein, 33 aa, Homo sapiens
KSFCVLYGDVAVLFFRSLAPSASIRCTSCCPVP

SEQ ID NO: 38855 - protein, 14 aa, Homo sapiens
LVLTVFLECFLLFS

SEQ ID NO: 38856 - protein, 28 aa, Homo sapiens
MGNINFPDDAEKARYSFFPATLAEPESP

SEQ ID NO: 38857 - protein, 12 aa, Homo sapiens
MMTWSIWNVLML

SEQ ID NO: 38858 - protein, 31 aa, Homo sapiens
TPPSPARHGPLPTCPAFVCLCVFAGWPDLWL

SEQ ID NO: 38859 - protein, 42 aa, Homo sapiens
KASAALVGEASIDMNRSTTRSAPCRPMLGVYYRYKNSLWSII

SEQ ID NO: 38860 - protein, 16 aa, Homo sapiens
MCSFLKKVRFPWILAL

SEQ ID NO: 38861 - protein, 94 aa, Homo sapiens
MSLRRGETSSSLQLVARLLSLSQEDALLQVWNLLLRALAWQLTLDLRVLRSLGTHLGAVAFRDRPSYRCNNLLDILLWKRKRTTRGSMALGCRN

SEQ ID NO: 38862 - protein, 58 aa, Homo sapiens [sequence omitted]

SEQ ID NO: 38863 - protein, 60 aa, Homo sapiens
MESRKKDIKKRILGDIFDSLDQTLPEAHISEISRYKNKYFLFIVLLDLRQALSFSDSSSS

SEQ ID NO: 38864 - protein, 95 aa, Homo sapiens
MCAFVSAAIPSSVIALLHFCWSQGRGVPANVRVVRPQPLPFYTVLGCLLACGGGRGSQYLCTVYCPEPAFIPNFSKIALKGGGRGSNIVLKGGTG

SEQ ID NO: 38865 - protein, 112 aa, Homo sapiens
MGSFISLIKNLAKEEIVPKVASILTDMLEKWCADQFMTCVPKLATEIVFAVLRSLIQMMLIYVLEKAESFPDKLLKLFRNISYFLKKMMSGQAAQEEEGNPDEFSDLLGGCD

SEQ ID NO: 38866 - protein, 52 aa, Homo sapiens
MKIPSRPAALPADAEKETRLGDAAHPYPQRAALFPLALAFGSGHSKHPWAPG

SEQ ID NO: 38867 - protein, 38 aa, Homo sapiens
MQFTFLSCFCPGTPDIRVRQTSLSPSCSESESHESSMD

SEQ ID NO: 38868 - protein, 57 aa, Homo sapiens
MERWSHPKRQIGLSAHLITAAGRSKSCPPPRYCRGIPTAARISCTLKGRRLLRSLTP

SEQ ID NO: 38869 - protein, 56 aa, Homo sapiens
LYFGWKRHRRGCVLSLKISISCGLDQKLLITYLEGIYKCLSMCSLFVHVVYYITKE

SEQ ID NO: 38870 - protein, 49 aa, Homo sapiens
LSTVKDYLSNSSFQSDQVGAFLFHMFQGCTVGLFNVGVEIQSGLWKERP

SEQ ID NO: 38871 - protein, 29 aa, Homo sapiens
LVLFQRLVRLFFPLALSHTSSQWAVCQET

SEQ ID NO: 38872 - protein, 68 aa, Homo sapiens
MIFFFFLAAWERLSAFFHDIQICPFSTHTQLSHLVRFILPKERCSPTLTLFQRATLSQPQQPCQEKAR

SEQ ID NO: 38873 - protein, 12 aa, Homo sapiens
LWFSCGMLWIML

SEQ ID NO: 38874 - protein, 50 aa, Homo sapiens
LMTIGFISARIVSVCECIILRQYDFMLLQTMYSMYVLWVVYIHNIYYIYI

SEQ ID NO: 38875 - protein, 33 aa, Homo sapiens
MMAFICLYIILIPVRGKCNTLTTALEIASHLDC

SEQ ID NO: 38876 - protein, 145 aa, Homo sapiens
LPENRIIPLVLFHFLLLPLLTPQPPPPPRRPRLWLHGSAARARGLRAGPQGRGRRRRIMKAGVATAPDGGQQPEDEPEQPPPRRHPDAEQQSPPPPQQQLRARADPEPEEEGDRDPEEEEEEKARPLARPDLPFSRLLPLDRRDL

SEQ ID NO: 38877 - protein, 30 aa, Homo sapiens
MGGPGLRLDWTQAGVCVCVCMCVCGQWQHQ

SEQ ID NO: 38878 - protein, 62 aa, Homo sapiens
MHLGKEDLPAFLTSPLGFLLCSPGLWLSLLVLCWVTCHCSACMPCRSWLEPAGGDLPETLVK

SEQ ID NO: 38879 - protein, 95 aa, Homo sapiens [sequence omitted]

SEQ ID NO: 38880 - protein, 18 aa, Homo sapiens
VGLNKAKPLALLLLSFPA

SEQ ID NO: 38881 - protein, 50 aa, Homo sapiens
LHKAGLQVLCFLIPSPDTHLLCGPGHVIKKLAVCMRLPTISIPRGLGGCL

SEQ ID NO: 38882 - protein, 42 aa, Homo sapiens
MVLILDSLSVVPSVLSWLFPESSGSLHIKQMLHRWICLDLPI

SEQ ID NO: 38883 - protein, 19 aa, Homo sapiens
LSLVVLPMCLLHHFLPASA

SEQ ID NO: 38884 - protein, 20 aa, Homo sapiens
LPCSSFLLSGCSLALLLPPA

SEQ ID NO: 38885 - protein, 174 aa, Homo sapiens
MLLGSPRSWLMSTRPGLLSCSLSVTAAMKTWQNSCWSIPVKLGVEATVWSWRWRPQTSISSPSLGSRIFFLSNGMERFPETPRTGRLSCVCLLYPWWAVALYHLGRNLSTSTRSCFGTMWRSSPPPSWSSPGMWSSTSPSSCCLPTCCSWISIRCHTPPSWSCTRWSLSSSVMK

SEQ ID NO: 38886 - protein, 63 aa, Homo sapiens
LASLRELWKCFLIDTGRPVLFQSNYLPKFSVLVLELCALVSVFLSTAVILCLIILLFCFHSLL

SEQ ID NO: 38887 - protein, 7 aa, Homo sapiens
VLIYLLL

SEQ ID NO: 38888 - protein, 79 aa, Homo sapiens [sequence omitted]

SEQ ID NO: 38889 - protein, 112 aa, Homo sapiens [sequence omitted]

SEQ ID NO: 38890 - protein, 48 aa, Homo sapiens
LKGFVSCLLPIISSALKNLSCPQFIMSRRFIFSLCFFLFQFILNAYFS

SEQ ID NO: 38891 - protein, 56 aa, Homo sapiens
MGIYLDKGISLFPLSLCLMGPHSAKLEGTKTLSWPSGSRGRGVGAGSESLHGLDPL

SEQ ID NO: 38892 - protein, 34 aa, Homo sapiens
LAQLACLYKKVHIPLKLLCLLLCVGLNFSFMNHG

SEQ ID NO: 38893 - protein, 73 aa, Homo sapiens [sequence omitted]

SEQ ID NO: 38894 - protein, 59 aa, Homo sapiens [sequence omitted]

SEQ ID NO: 38895 - protein, 103 aa, Homo sapiens
MSLRVCLKKLHEGLLLTPLHSLSWSLISMSSRRVKKGTKSRSFKPHPHLRMDGFLCRPCRPLSQQTFPAALEPSKTSTTSHQWLVRQCPQGSCCMPLIRPSWL

SEQ ID NO: 38896 - protein, 82 aa, Homo sapiens
VDSASISASMATFRRQRRSCVFLCTQLTACLYGASLSGRKCLKKQRSRWCVHSADQLVWPGPGGLVARKFQVEGKCRGYLQI

SEQ ID NO: 38897 - protein, 46 aa, Homo sapiens
LSVFREGRGFSRFTIWVVYMLVEILPVCLEGSVNVRALEINKITAT

SEQ ID NO: 38898 - protein, 134 aa, Homo sapiens
LWHIFRPLLNPFLSAMTLFMYEVMPVETKCCHIGSPKTSNLVQILDWQLLLSLDLSETFAPISSLCDSSTDIPISLRTISGIFLAFFRLSLHLIFCCSLGNKEMSHTLKSKNKNWSSERVNLSISHRAGSVVSP

SEQ ID NO: 38899 - protein, 95 aa, Homo sapiens
LRPARAALVAPLPTPRRGLAAAAAHLPPQPPPATRTFSGPAPSGSPGTARHPRAADPARAGAPGRARHSAVASAARAAPEPRTGAQSAGDSGADP

SEQ ID NO: 38900 - protein, 72 aa, Homo sapiens
LTSWLTLAMVVSVVGWEIECRISQLCKKLVNSTLVVCPLAADTVSDQAPRSLPSPLVFELPLLPDVLMVMQS

SEQ ID NO: 38901 - protein, 80 aa, Homo sapiens
LGVASEKSFPIPRSQFFFLFTSRSVIILSFILWSMTRFFFCFVLFFRLFLCFEMESCSVTQAGVQWRDLGSLQSLSPGFK

SEQ ID NO: 38902 - protein, 22 aa, Homo sapiens
LLLFVFFVEMGFHRVGQAVLNS

SEQ ID NO: 38903 - protein, 42 aa, Homo sapiens
LRLCPRCVRPLSVTLCVSRCLAVAVTPRLSPSTSWTLPRKLH

SEQ ID NO: 38904 - protein, 132 aa, Homo sapiens
LGSSSLGEIFEFLPHPLGLLHTRPRLPASLPTHLSSFLCPPAASPALLPIPRPHSRLLPSEVVEERFPPGLVHVSRPLLAGLLGCFGPFVGTIVSHGRAGHHWGRWPTLRLLCPLGPGNIVTSRADLTNCRL

SEQ ID NO: 38905 - protein, 24 aa, Homo sapiens
MFILQLFLCHRGLLAGGQWVVNTF

SEQ ID NO: 38906 - protein, 92 aa, Homo sapiens
MPPTPGPSILSSLVPIPVSPFHPCPPVLYLWPAPISESFFQSLIWLIPHLQLPPYMSHTIPWLALHSLLFPYSSFPVIPYQMVGTLSPALTR

SEQ ID NO: 38907 - protein, 65 aa, Homo sapiens [sequence omitted]

SEQ ID NO: 38908 - protein, 26 aa, Homo sapiens
LAKKGREYKHQRQMTYIWELIRLALS

SEQ ID NO: 38909 - protein, 68 aa, Homo sapiens
LFPCSCSPLSLVLVLQKAVWMVPAREGVGVLGRQEAEDPDCFSLGNLTIGQIAPLQTERNLNSTKKAS

SEQ ID NO: 38910 - protein, 57 aa, Homo sapiens
LRMLFIAALHINLSVSQPASVLTSLPAFSPASLLSLMAFHGSSPCPSSAARPSSRPL

SEQ ID NO: 38911 - protein, 76 aa, Homo sapiens
LRTRKMKLGGHSWICLLHFQLCSTSQRFLKNEDISALSSGGEVCLASASTLLLFTRCMHALSESGLCFPSRRDHPP

SEQ ID NO: 38912 - protein, 59 aa, Homo sapiens
LSCPPREMGNPKAPSRVSLAPWGCAVARQTMLLAAGGLQAQVMESDCPGSNFRLCLVVG

SEQ ID NO: 38913 - protein, 62 aa, Homo sapiens
LGRFVGTLNLSFLLSFQQAALLWLVESGLPGMALTSRPGADLAPGLFQPLLASCFPPPGVQW

SEQ ID NO: 38914 - protein, 31 aa, Homo sapiens
MARAATGAGKATWTLFCWLMAPRACVHKTSS

SEQ ID NO: 38915 - protein, 17 aa, Homo sapiens
VSGTFAMAWTMAVSSSV

SEQ ID NO: 38916 - protein, 42 aa, Homo sapiens
LSFLGFLLSLLGFIPSEPGLAFLGCKLRAGSRSAEPRFSHLP

SEQ ID NO: 38917 - protein, 25 aa, Homo sapiens
MQLQVQWLLLVLQTPLHKPTALSWL

SEQ ID NO: 38918 - protein, 36 aa, Homo sapiens
LVYFGIFCCWCCQSLFFLKLCDYIFDILHFKERYVV

SEQ ID NO: 38919 - protein, 128 aa, Homo sapiens [sequence omitted]

SEQ ID NO: 38920 - protein, 14 aa, Homo sapiens
VTTCLICLLLTGMQ

SEQ ID NO: 38921 - protein, 125 aa, Homo sapiens
VARPGPWSRASGMSPSPRWGFLCVLFTAVHPAPSTAPVQDKCPVNTWEAMQASSQQLLQTDPRPKPFLLPPLPPLLLISAGTEVSSLVFQKSPLHTQPEGAIKTVGQPTSVHSKVLSKGSLLLGE

SEQ ID NO: 38922 - protein, 116 aa, Homo sapiens
LGGMSPSPRWGFLCVLFTAVHPAPSTAPVQDKCPVNTWEAMQASSQQLLQTDPRPKPFLLPPLPPLLLISAGTEVSSLVFQKSPLHTQPEGAIKTVGQPTSVHSKVLSKGSLLLGE

SEQ ID NO: 38923 - protein, 127 aa, Homo sapiens
LAAEATSHAVSESGMSPSPRWGFLCVLFTAVHPAPSTAPVQDKCPVNTWEAMQASSQQLLQTDPRPKPFLLPPLPPLLLISAGTEVSSLVFQKSPLHTQPEGAIKTVGQPTSVHSKVLSKGSLLLGE

SEQ ID NO: 38924 - protein, 41 aa, Homo sapiens
LSKVGSFYLVMRAGIFVCCVLCVPPVPSQCLADGKCSTHIG

SEQ ID NO: 38925 - protein, 102 aa, Homo sapiens
MKHVYYRKHQLAQMLLIFGVELQAGDLEGPRSACSHPLTSRKRRNVGLEPMKSTGIWLCSVTLDKSLPLSGLQFPPCSMRAGDFVCFIHNVFPELSTVSGTH

SEQ ID NO: 38926 - protein, 119 aa, Homo sapiens
LALCQALCWMLGSIVRPGTAKAETNIPTVAHDTKLHRPENGRIHRNERQAVRCPALGRLQKRREDHPSWLTLGGLGSSQIVFLGIYKRVKIDTRNIHLFPFIYLTHTLGAMSSIPRRGS

SEQ ID NO: 38927 - protein, 106 aa, Homo sapiens
LAVTPAMGTLGQCSEKTRMPSRLTTVQNRQNLMTAEPRSLSLFTKKPPRKVPPPPAGTTSVADLNPCVCSLVTSCKPTLSSLSPEQTVGLTSPPPAGGRLFPLGHT

SEQ ID NO: 38928 - protein, 61 aa, Homo sapiens
LQPPQSQPTLLCLWRAVLLGGSCPAHCRMLKGIPGLHPPLASSSQSDNSQKCLQTLPSLPR

SEQ ID NO: 38929 - protein, 50 aa, Homo sapiens
LGNRACLWGRIKKKIEPLSVLLFYYLVNMRGFTRSMCVIYLSLPIVTFWK

SEQ ID NO: 38930 - protein, 95 aa, Homo sapiens
LRAALGLRSLVCALVRPPVLSTRAWPPDDAGAARAGRGSLRSLLPSAGPLRRSPQFPARTRSGPPNLRPKSGGGSGAVSRGALWNKVELEEQPPR

SEQ ID NO: 38931 - protein, 18 aa, Homo sapiens
MYIFFCMLFGCEELSLLF

SEQ ID NO: 38932 - protein, 84 aa, Homo sapiens
ISLLWTVSLHLMLQKSSLSLLVELTPRSLGFHAWQMARKNCTTFRFQVPKGEAQGQNGNSSMRTQQSTKVGQLHVEESEQIEFA

SEQ ID NO: 38933 - protein, 14 aa, Homo sapiens
MSFIVRLLVSEFVL

SEQ ID NO: 38934 - protein, 87 aa, Homo sapiens
LMTVSLFLLLATSQSQDGCCDSGSCPNSRQQEGHGAAPASRCPCRPSLQAQEPKEESTQMWWLTPVIPPLWEAEARGSLEPRSWRPT

SEQ ID NO: 38935 - protein, 18 aa, Homo sapiens
TKKRSYFSFYFAACLLPV

SEQ ID NO: 38936 - protein, 10 aa, Homo sapiens
ILWGLVGMPF

SEQ ID NO: 38937 - protein, 40 aa, Homo sapiens
MSFLRVIFKFKRCSCRCCSIFAVTLRAWRDSSQEVSCSLC

SEQ ID NO: 38938 - protein, 69 aa, Homo sapiens
VRSHTSRRADQGCCQHLPLRAPLSLGPFRTLFAHKLPKKKEPTCWYCWLVSLWSTSLLLLCYLLAPLPM

SEQ ID NO: 38939 - protein, 77 aa, Homo sapiens
TAAAGRRAGSGHGVGSGEGRRRRRSKGVGEKTSERNRKPAGEAAAAAASLGAWAALFAGCPQLRLGPGLASPARTHG

SEQ ID NO: 38940 - protein, 53 aa, Homo sapiens
MTSLSRCCRRCWGWSLSSGFWAMALPCGFSVSTSSPGNPAGFSCSTWQWLTFY

SEQ ID NO: 38941 - protein, 79 aa, Homo sapiens
LSRYPRACSHPVECTFVFNKSLLLLLHSFLALFVCLSSSLFNTPRTWTLFTGNIFWQANQEKRISAWTLHSCWENEHQC

SEQ ID NO: 38942 - protein, 35 aa, Homo sapiens
MCSLGVLLSPPQSPASLPSCPLPKGKNSLEVGRAP

SEQ ID NO: 38943 - protein, 12 aa, Homo sapiens
LLFFFVFPLSSF

SEQ ID NO: 38944 - protein, 76 aa, Homo sapiens
LELRPCVFSRLLIRRGALGAPAWVAVPSVCGPQFLGGAWTLALRGRPVPRSVATDPRTLFAGDSRSLRLPRMMACD

SEQ ID NO: 38945 - protein, 63 aa, Homo sapiens
LSLVKSNIKICLLLILMLPAQQVHQRARMNYGCHECPCEAVGKPWLDCEGYLKSILESTRSSM

SEQ ID NO: 38946 - protein, 26 aa, Homo sapiens
KIPSLHILWVSASVLISLHTPSAFLS

SEQ ID NO: 38947 - protein, 45 aa, Homo sapiens
TGAWWARPRCKAWIAALWLSPQALRAAWSRCCSPSLAHWSPRSAC

SEQ ID NO: 38948 - protein, 49 aa, Homo sapiens
MWVFSPYTELKGDDNNVGTTNPPPSRGVTSVTSLLCFLLHLALFTSICI

SEQ ID NO: 38949 - protein, 83 aa, Homo sapiens
MPSSLLSLGRSSQQLLQTDPRPKPFLLPPLPPLLLISAGTEVSSLVFQKSPLHTQPEGAIKTVGQPTSVHSKVLSKGSLLLGE

SEQ ID NO: 38950 - protein, 61 aa, Homo sapiens
MGVCPFAFLFCSWNPAGGFDRILGQDLVALPDDPLHSDCPLYPVLLGAPRDTFLASLRGTI

SEQ ID NO: 38951 - protein, 30 aa, Homo sapiens
LGFANLVALSVSCFSKAAVQKERRYQEGTC

SEQ ID NO: 38952 - protein, 99 aa, Homo sapiens
IWMRKLKLRNSEEFVQCHSPVINGTKIFLLMGQDGIVKWLFTVNCNTILFMDLFAYFSLHRETFLPWLRTHSWIEPTGELSGKHLANFFFFEMESCCVA

SEQ ID NO: 38953 - protein, 65 aa, Homo sapiens
LCLSLLLAVFLFSFSSALVSWTPLLCPFFLFITQSAVIVISMASSLHSSSCFQPPKPEHCLASNH

SEQ ID NO: 38954 - protein, 37 aa, Homo sapiens
LIVSGSSSSSFQLILNSLSFSFLLFMTVSGFLTPLPS

SEQ ID NO: 38955 - protein, 48 aa, Homo sapiens
IICFFALVAPVAWVGPPAPPWQDNLLVSPSLACSSCRACELLTTGSTL

SEQ ID NO: 38956 - protein, 34 aa, Homo sapiens
ILLMLLTTWLLHSHQTRDAILDFPTLICSSPLTL

SEQ ID NO: 38957 - protein, 9 aa, Homo sapiens
RAFFFFWVM

SEQ ID NO: 38958 - protein, 88 aa, Homo sapiens
LSQGARKLCHCATWVFFILQSLPQQNRTPQTPSSSLCVALSGSNKSKLWVCECLCVLLFTSHLLKSVYVRGWGVCVKESEEEKEREIN

SEQ ID NO: 38959 - protein, 13 aa, Homo sapiens
LNMTLLLTLTLGG

SEQ ID NO: 38960 - protein, 44 aa, Homo sapiens
LARNPGSATLENSSSHNNFIQFIFKAQLYFMLSVIIFLDTFQIL

SEQ ID NO: 38961 - protein, 84 aa, Homo sapiens
IDWVSGAFFFSPLSFFSSVLLHARKLQSAARPPWVRDIQPRSLPCIVQPKDERPKGRKLKKSPTCAGSVHGLGKGIQRRWERRV

SEQ ID NO: 38962 - protein, 88 aa, Homo sapiens
KRAFGARASRGGARSLPVPLPLVISAALGGPGRSETESESPGAKPGETQLRRTPAPLSLLLRPSRGASPSAPRAGELGAQVPAAPGMV

SEQ ID NO: 38963 - protein, 51 aa, Homo sapiens
VYLRVRPILPAGLCLGVTLPELAPTTVATVMLMCDCCQEPAHMTVWRKFFP

SEQ ID NO: 38964 - protein, 45 aa, Homo sapiens
LLTAQRRGLGIRSRWPYAGGWSRGSAARLAAVVGSDGERAARLEQ

SEQ ID NO: 38965 - protein, 50 aa, Homo sapiens
LRQRRPIFLFLLLLSLLNLKTMMKSYIMIYLHLMNNSFPCKVIKVLPRRH

SEQ ID NO: 38966 - protein, 84 aa, Homo sapiens
MLLASFMFALPATYDVKFGENVVFFCFFCVFFIFVFLFFYFSLKVIHLFWRSLYHSLSPRADVPSGSNLYRRKHVGFRTRQIWI

SEQ ID NO: 38967 - protein, 23 aa, Homo sapiens
MEKRRAGSREAQVKGDFILFFNF

SEQ ID NO: 38968 - protein, 79 aa, Homo sapiens
LMLKTTPRILEESIREGRQFWKHFKNRSTESNRRMMFKLSPIGLLFMFVNIPGTNFNINNLKFYGSIQSCVKPESRDQT

SEQ ID NO: 38969 - protein, 108 aa, Homo sapiens
LCFLFYFIYFIFRFSVLISPREGDLGIHPMSSRELPWPRSESSWDATGSESAPQVSPPAPPNLSIPTRITPSAAGRGAREPGGLLEPAQQDPLSPIFCSRARGLSGQS

SEQ ID NO: 38970 - protein, 26 aa, Homo sapiens
MCVCVCVCVCVCARAHVHMCVGRWRG

SEQ ID NO: 38971 - protein, 37 aa, Homo sapiens
LSRAEKQRRGKLEAPLARDRNLESLATSILLRPEQAS

SEQ ID NO: 38972 - protein, 25 aa, Homo sapiens
MRGRTFAVLFTTLPPAQNLAYAYSM

SEQ ID NO: 38973 - protein, 37 aa, Homo sapiens
LCGELHAPILLPTAPCPGLLLPPVLLWTVLLPPSLLL

SEQ ID NO: 38974 - protein, 36 aa, Homo sapiens
LGQGVMIAWLTAGLVSVCCCTLWRFSLELLPEKAPL

SEQ ID NO: 38975 - protein, 75 aa, Homo sapiens
VWMSVRSSTSSGLPNTFSMKAVCTGPHSIRLKLLAGEQRVGGGGRQPGPSPSPNPSPSPNHVPAPDREQHRCAGK

SEQ ID NO: 38976 - protein, 31 aa, Homo sapiens
MPVLAARAAAVAGAGEAAAGPGRGVAWGTGA

SEQ ID NO: 38977 - protein, 37 aa, Homo sapiens
MADGQGSSLGGLNLPCGTSLQGTPTSPSNTDPEGAPG

SEQ ID NO: 38978 - protein, 91 aa, Homo sapiens [sequence omitted]

SEQ ID NO: 38979 - protein, 60 aa, Homo sapiens
VPLPKPLGPIHGKRDLPLHLLHAALSPPAAGVAGMGGPAAGGCPAVPEPQVPVKSPGPTH

SEQ ID NO: 38980 - protein, 66 aa, Homo sapiens
LMCTALCWALVLGDRCSVVECVPRNREGAMGARSQGIRNIPPRTHSHLFSNSAYLLNSPDALPVDC

SEQ ID NO: 38981 - protein, 69 aa, Homo sapiens
LSRLVSRLVGSVPRDGTGRAHFRVLLSPLRPKKGPSLSPRLGVLSLHSFLPPAAAAAANLQGTAAAFSR

SEQ ID NO: 38982 - protein, 114 aa, Homo sapiens
LFFVFWWFLFFVFFVLRWSLTLSPRLECSGTILAHCNLRLLGSSNSPASAFQVAGITGTHHHTQLIFVFLIERGFFHVGQAGLELLTSGDPPASASQSAEITGMSYHAWPVLLF

SEQ ID NO: 38983 - protein, 37 aa, Homo sapiens
LTSPKVISNLKWTLFQLLGASLPLFMVAGKLPPRRLF

SEQ ID NO: 38984 - protein, 92 aa, Homo sapiens
MTKVPISAKFSQQHETAYSRRNSFCLPSLSLSRSLALALALSRCVLISPPNPLSPLQPPSSLAFSLASLFSSSTHPLWFDNFVLSVSQKRLL

SEQ ID NO: 38985 - protein, 104 aa, Homo sapiens
MAATSACSTFNWKSPHMSWFSLLKICLSSLGGLMHFSVSADQLLPPPNLNGRMRHSGFSYPKRGFFPLFVSIIHFIGRNSVPVNSNWDQRNRVPLLKMAVTRGY

SEQ ID NO: 38986 - protein, 37 aa, Homo sapiens
MSWFSLLKICLSSLGALENIGYFLLTPMVSFKKFAVV

SEQ ID NO: 38987 - protein, 71 aa, Homo sapiens
LPRGHRLKPLSIALSLCLQCPSSVISRPRLSPGPSLSAPPYPKLAPPPVAELRPPTAGAAVPWLWPSALSS

SEQ ID NO: 38988 - protein, 45 aa, Homo sapiens
LQIKLPDFTHSSFCLWTGTGLGLSQHLPTGGCSLPMGHLGGPWAS

SEQ ID NO: 38989 - protein, 74 aa, Homo sapiens
MGRGPGCRKSSYLQELHHNLEGSSWSCEFSLYSVTIPDHLIKMLPPSIGFIELVTSYCCIAFFSFFSCTLNNLT

SEQ ID NO: 38990 - protein, 139 aa, Homo sapiens
LETRAGPGRWLGGPCRGAVAPSAAPRARPGALEGGGGVSEECLGTPARVLDGSLSLPRARTRRTVGEAPAPCLLSVALLFFFLLCVGFFLELFHRNSCNKQLVFSWCSDVASGVGWTLLLPPPSRPGAGFVPRSPASHP

SEQ ID NO: 38991 - protein, 37 aa, Homo sapiens
LAIRKLFKVEADLDRKMLITGLFIIAIYIHIWLVLGE

SEQ ID NO: 38992 - protein, 71 aa, Homo sapiens
LLMLNSMNLLSDAVLDCPCCISIISLFSFSLYYYNCSFYMKARKLKLEEHLSATCQFCVSVLYVCVNFPLK

SEQ ID NO: 38993 - protein, 24 aa, Homo sapiens
LLSLSLACSLSLFVLSPSEEGKVC

SEQ ID NO: 38994 - protein, 70 aa, Homo sapiens
LFGVWTLLALILCPDPGPSGIETFLKKTQVGKGPQWKEFLLEDVTENSILQCFFSCAGIQKDTSLGITVY

SEQ ID NO: 38995 - protein, 119 aa, Homo sapiens
VSLASLLPARAPRPWPPRPLLRRGRDSARRHFWTRLLLSVLFLRAPLQTAAPGTDPPPGLGALLACPGVPASRCARQGSGGVQLHLGRGTGPEGLGGHESLASAAFVFQRGGSDEPLLT

SEQ ID NO: 38996 - protein, 111 aa, Homo sapiens
VGPQQFGMSLFPPPASADRGPPARPRRPPHPRPSLLLRFPFSPVLGSDIRGRRGRQPKQPAASAAERCAPAPAPAPAPAPPPPPPKSGPIGGLSSRHREQQGQVGRRRRLG

SEQ ID NO: 38997 - protein, 21 aa, Homo sapiens
LVFWLFYYLNMCIHNYGINSI

SEQ ID NO: 38998 - protein, 15 aa, Homo sapiens
LCLLDLFFFLVVLRS

SEQ ID NO: 38999 - protein, 64 aa, Homo sapiens [sequence omitted]

SEQ ID NO: 39000 - protein, 54 aa, Homo sapiens
MTTREDAERRPGGGSGEKQRQGRLPIGEPRVPGPSVLCTYAEAPTRPVTANCLA

SEQ ID NO: 39001 - protein, 34 aa, Homo sapiens
MLLMKTVLGKWFCLLTGFTHGDEALECGHFVLYG

SEQ ID NO: 39002 - protein, 107 aa, Homo sapiens
LVLFLLILPATPRKQSEPKTTDAAAPGTADTAGPGTMDTAVPRKAETAVPGKRNTAVPGTADPASPGTADTAEPMRTTTPTVLASWPSLTQSTNSTQPTALTSPLTR

SEQ ID NO: 39003 - protein, 76 aa, Homo sapiens
LCLFSLVWIFSLALPMYPASPADCQWEDPQPSSGLCRNGGGQYPQVVNCKLAENQGGHPCPQPPSTYLPQNQGLCP

SEQ ID NO: 39004 - protein, 134 aa, Homo sapiens
LVVAALALRTLRLRQRGLAAPAPARPRPPTSCLSPNTAALPCGGPFSVSPARPVHFGRHERPVPPGSPGWLPGAPQGGHPKGAECPRRGWHDPHSLGCLPWQPRVAASHCEPRLPMATCTACPSWCPSEPTSGA

SEQ ID NO: 39005 - protein, 27 aa, Homo sapiens
MLCTTLQTVCSLILMDIVWARGRDGWL

SEQ ID NO: 39006 - protein, 38 aa, Homo sapiens
MPWWMKETSILAIAMYCWVLLRSTQMELSVSSPSNRNK

SEQ ID NO: 39007 - protein, 53 aa, Homo sapiens
VHAASINLLSSRPSIRTCPLASRILGTPLALPCVEMFMSVPVGHFVKLKSFKR

SEQ ID NO: 39008 - protein, 69 aa, Homo sapiens
LLPPSDPAGTPGQGRQFRLSKAAAAPRLELEGWVNPAWASPMNSALPGTLFILIKGVLQMGLSLGALCL

SEQ ID NO: 39009 - protein, 27 aa, Homo sapiens
VAPTLLGLGSQGLISSSVERAGSTPLL

SEQ ID NO: 39010 - protein, 83 aa, Homo sapiens
LFLFLFLFLWGGATKQTQSILCQVLGWTGQLCVGVVFFSIFLFVSCFLIMFTICLNHSVFYKDSTSSPLSSPLLRPLRLLGDA

SEQ ID NO: 39011 - protein, 24 aa, Homo sapiens
MKDICRDPISTKSHILRLLVGVSF

SEQ ID NO: 39012 - protein, 17 aa, Homo sapiens
LALTTERYHLTVLEAKV

SEQ ID NO: 39013 - protein, 167 aa, Homo sapiens
LLSTVLPSLLQSQTNSSPSPWGDSASRSCWRNEDVCPCLPGQARFLPSSRVSPDPDSVPFCLPATSIPKFESADTLLPATLPSYCVVCFSWCFKSVCRASAVTGNCTRCSDLVVLCLPINKSRLFLFLFAAICVCVCVCVARYLALLTMHCCFFPEGPAGTVAMVCV

SEQ ID NO: 39014 - protein, 38 aa, Homo sapiens
LVHEGNCLPRSLSLRLLEKHLMPFSLLGVFYVRFLGVV

SEQ ID NO: 39015 - protein, 27 aa, Homo sapiens
MRRMETLARQCLWAASFAGPPPKPRTS

SEQ ID NO: 39016 - protein, 51 aa, Homo sapiens
LLLLWNILSRAHALFVCVCTVHPSDCDSSEDISRPVLRMTFSSTATVSLSY

SEQ ID NO: 39017 - protein, 61 aa, Homo sapiens
MAGTKMTDGGWQANTGGLLTPRGESAWGQFFSRPCCSHQLQHRRGRLLRKSSHGPGSRSTF

SEQ ID NO: 39018 - protein, 10 aa, Homo sapiens
EQKLISEEDL

SEQ ID NO: 39019 - protein, 124 aa, Homo sapiens
MADEKPSNGVLVHMVKLLIKTFLDGIFDDLMENNVLNTDEIHLIGKCLKFVVSNAENLVDDITETAQIAGKIFREHLWNSKKQLSSDISSDGEREANMPGLNIRNKEFNYLHNRNGSELDLLGM

SEQ ID NO: 39020 - protein, 124 aa, Homo sapiens; identical to SEQ ID NO: 39019

SEQ ID NO: 39021 - protein, 124 aa, Homo sapiens; identical to SEQ ID NO: 39019

SEQ ID NO: 39022 - protein, 124 aa, Homo sapiens; identical to SEQ ID NO: 39019

SEQ ID NO: 39023 - protein, 124 aa, Homo sapiens; identical to SEQ ID NO: 39019

SEQ ID NO: 39024 - protein, 40 aa, Homo sapiens
MADISSDGEREANMPGLNIRNKEFNYLHNRNGSELDLLGM

SEQ ID NO: 39025 - protein, 40 aa, Homo sapiens; identical to SEQ ID NO: 39024

SEQ ID NO: 39026 - protein, 95 aa, Homo sapiens [sequence omitted]

SEQ ID NO: 39027 - protein, 455 aa, Homo sapiens [sequence omitted]

SEQ ID NO: 39028 - protein, 63 aa, Homo sapiens [sequence omitted]

SEQ ID NO: 39029 - protein, 334 aa, Homo sapiens
MATLKEKLIAPVAEEEATVPNNKITVVGVGQVGMACAISILGKSLADELALVDVLEDKLKGEMMDLQHGSLFLQTPKIVADKDYSVTANSKIVVVTAGVRQQEGESRLNLVQRNVNVFKFIIPQIVKYSPDCIIIVVSNPVDILTYVTWKLSGLPKHRVIGSGCNLDSARFRYLMAEKLGIHPSSCHGWILGEHGDSSVAVWSGVNVAGVSLQELNPEMGTDNDSENWKEVHKMVVESAYEVIKLKGYTNWAIGLSVADLIESMLKNLSRIHPVSTMVKGMYGIENEVFLSLPCILNARGLTSVINQKLKDDEVAQLKKSADTLWDIQKDLKDL

SEQ ID NO: 39030 - protein, 214 aa, Homo sapiens
MAWSNQSAVTEFILRGLSSSLELQIFYFLFFSIVYAATVLGNLLIVVTIASEPHLHSPMYFLLGNLSFIDMSLASFATPKMIADFLREHKAISFEGCMTQMFFLHLLGGAEIVLLISMSFDRYVAICKPLHYLTIMSRRMCVGLVILSWIVGIFHALSQLAFTVNLPFCGPNEVDSFFCDLPLVIKLACVDTYILGVFMISTSGMIAWCASSSW

SEQ ID NO: 39031 - protein, 268 aa, Homo sapiens [sequence omitted]

SEQ ID NO: 39032 - protein, 180 aa, Homo sapiens [sequence omitted]

SEQ ID NO: 39033 - protein, 924 aa, Homo sapiens
MDRQCSERPYSCTPTGRVSSAVSQNSRISPPVSTSMKDSSCMKVHQDSARRDRWSHPTTILLHKSQSSQATLMLQEHRMFMGEAYSAATGFKMLQDMNSADPFHLKYIIKKIKNMAHGSPKLVMETIHDYFIDNPEISSRHKFRLFQTLEMVIGASDVLEETWEKTFTRLALENMTKATELEDIYQDAASNMLVAICRHSWRVVAQHLETELLTGVFPHRSLLYVMGVLSSSEELFSQEDKACWEEQLIQMAIKSVPFLSTDVWSKELLWTLTTPSWTQQEQSPEKAFLFTYYGLILQAEKNGATVRRHLQALLETSHQWPKQREGMALTLGLAATRHLDDVWAVLDQFGRSRPIRWSLPSSSPKNSEDLRWKWASSTILLAYGQVAAKARAHILPWVDNIVSRMVFYFHYSSWDETLKQSFLTATLMLMGAVSRSEGAHSYEFFQTSELLQCLMVLMEKEPQDTLCTRSRQQAMHIASSLCKLRPPIDLERKSQLLSTCFRSVFALPLLDALEKHTCLFLEPPNIQLWPVARERAGWTHQGWGPRAVLHCSEHLQSLYSRTMEALDFMLQSLIMQNPTADELHFLLSHLYIWLASEKAHERQRAVHSCMILLKFLNHNGYLDPKEDFKRIGQLVGILGMLCQDPDRATQRCSLEGASHLYQLLMCHKTGEALQAESQAPKELSQAHSDGAPLWNSRDQKATPLGPQEMAKNHIFQLCSFQVIKDIMQQLTLAELSDLIWTAIDGLGSTSPFRVQAASEMLLTAVQEHGAKLEIVSSMAQAIRLRLCSVHIPQAKEKTLHAITLLARSHTCELVATFLNISIPLDSHTFQLWRALGAGQPTSHLVLTTLLACLQERPLPTGASDSSPCPKEKTYLRLLAAMNMLHELQFAREFKQAVQEGYPKLFLALLTQMHYVLELNLPSEP

SEQ ID NO: 39034 - protein, 380 aa, Homo sapiens; identical to SEQ ID NO: 2082

SEQ ID NO: 39035 - protein, 124 aa, Homo sapiens [sequence omitted]

SEQ ID NO: 39036 - protein, 334 aa, Homo sapiens; identical to SEQ ID NO: 8686

SEQ ID NO: 39037 - protein, 1445 aa, Homo sapiens
MGEDSPVAMFSWYLDNTPTEQAEPLLDACRLRGFWPRSLTLLQSNTSTLLLNSSFLQSRGEVIRIRATALTRHAYGEDTYVISTVPPREVPACTIAPEEGTVLTSFAIFCNASTALGPLEFCFCLESGSCLHCGPEPALPSVYLPLGEENNDFVLTVVISATNRAGDTQQTQAMAKVALGDTCVEDVAFQAAVSEKIPTALQGEGGPEQLLQLAKAVSSMLNQEHESQGSGQSLSIDVRQKVREHVLGSLSAVTTGLEDVQRVQELAEVLREVTCRSKELTPSAQWEASLALQHASEALLTVSAKARPEDQRRQAATRDLFQAVGSVLEASLSNRPEEPAEASSSQIATVLRLLRVMEHVQTTLLLGKLPGGLPAMLATPSISVYTNRIQPWSWQGSSLRPDAADSATFMLPAASSLSSLEGGQEPVDIKIMSFPKSPFPARSHFDVSGTVGGLRVTSPSGQLIPVKNLSENIEILLPRHSQRHSQPTVLNLTSPEALWVNVTSGEATLGIQLHWRPDIALTLSLGYGYHPNKSSYDAQTHLVPMVAPDELPTWILSPQDLRFGEGVYYLTVVPESDLEPAPGRDLTVGITTFLSHCVFWDEVQETWDDSGCQVGPRTSPYQTHCLCNHLTFFGSTFLVMSNAINIHQTAELFATFEDNPVVVTTVGCLCVVYVLVVIWARRKDAQDQAKVKVTVLEDNDPFAQYHYLVTVYTGHRRGAATSSKVTVTLYGLDGEREPHHLADPDTPVFERGAVDAFLLSTLFPLGELRSLRLWHDNSGDRPSWYVSRVLVYDLVMDRKWYFLCNSWLSINVGDCVLDKVFPVATEQDRKQFSHLFFMKTSAGFQDGHIWYSIFSRCARSSFTRVQRVSCCFSLLLCTMLTSIMFWGVPKDPAEQKMDLGKIEFTWQEVMIGLESSILMFPINLLIVQIFQNTRPRVAKEQNTGKWDRGSPNLTPSPQPMEDGLLTPEAVTKDVSRIVSSLFKALKVPSPALGWDSVNLMDINSLLALVEDVIYPQNTSGQVFWEEAKKREDPVTLTLGSSEMKEKSQCPKPKAARSGPWKDSAYRQCLYLQLEHVEQELRLVGPRGFSQPHSHAQALRQLQTLKGGLGVQPGTWAPAHASALQVSKPPQGLPWWCILVGWLLVAATSGVAAFFTMLYGLHYGRASSLRWLISMAVSFVESMFVTQPLKVLGFAAFFALVLKRVDDEEDTVAPLPGHLLGPDPYALFRARRNSSRDVYQPPLTAAIEKMKTTHLKEQKAFALIREILAYLGFLWMLLLVAYGQRDPSAYHLNRHLQHSFTRGFSGVLGFREFFKWANTTLVSNLYGHPPGFITDGNSKLVGSAQIRQVRVQESSCPLAQQPQAYLNGCRAPYSLDAEDMADYGEGWNATTLSNGSTRARTNVKGIPSGANSLCTGEEATWSPWGLIAKARQEFSAISLTTPGWTP

SEQ ID NO: 39038 - protein, 252 aa, Homo sapiens
MGLEALVPLAMIVAIFLLLVDLMHRHQRWAARYPPGPLPLPGLGNLAACGLPEHTILLRPVAAPLRGRVQPAAGLDAGGRAQWAGGRARGDGDPRRGHGRPPACAHLPGPGLRAAFPRGDPVALWARVARAEALLRVHLAQLGPGQEVAGAVGDRGGRLPLCRLRRPSRTPLSPQRPLGQSREQRDRLPHLRAPLRVRRPSLPQAAGPSSGGTEGGVGLPARGAECCPRPPAHPSAGWQGPTLPKGFPDPAG

SEQ ID NO: 39039 - protein, 252 aa, Homo sapiens; identical to SEQ ID NO: 39038

SEQ ID NO: 39040 - protein, 184 aa, Homo sapiens [sequence omitted]

SEQ ID NO: 39041 - protein, 45 aa, Homo sapiens
MLKLVIIENMAEIMLFSLDLLLFSTDILCFNFPSKMIKLPGFITI

SEQ ID NO: 39042 - protein, 238 aa, Homo sapiens
MLNTTSVTEFLLLGVTDIQELQPFLFVVFLTIYFISVAGNGAILMIVISDPRLHSPMYFFLGNLSCLDICYSSVTLPKMLQNFLSAHKAISFLGCISQLHFFHFLGSTEAMLLAVMAFDRFVAICKPLRYTVIMNPQLCTQMAITIWMIGFFHALLHSLMTSRLNFCGSNRIYHFFCDVKPLLKLSLISGCSVLSQGQSPWAPSFSHYSPISTLSPISSSRLILLACSAKHCPLVPPT

SEQ ID NO: 39043 - protein, 356 aa, Homo sapiens
MLPPWTLGLLLLATVRGKEVCYGQLGCFSDEKPWAGTLQRPVKLLPWSPEDIDTRFLLYTNENPNNFQLITGTEPDTIEASNFQLDRKTRFIIHGFLDKAEDSWPSDMCKKMFEVEKVNCICVDWRHGSRAMYTQAVQNIRVVGAETAFLIQALSTQLGYSLEDVHVIGHSLGAHTAAEAGRRLGGRVGRITGLDPAGPCFQDEPEEVRLDPSDAVFVDVIHTDSSPIVPSLGFGMSQKVGHLDFFPNGGKEMPGCKKNVLSTITDIDGIWEGIGGFVSCNHLRSFEYYSSSVLNPDGFLGYPCASYDEFQESKCFPCPAEGCPKMGHYADQFKGKTSAVEQTFFLNTGESGNFTS

SEQ ID NO: 39044 - protein, 226 aa, Homo sapiens
MNNSQISTVTQFVLLGFPGPWKIQIIFFSMILLVYIFTLTGNMAIICAVRWDHRLHTPMYVLLANFSFLEIWYVTCTVPNMLVNFFSKTKTISFSGCFTQFHFFFSLGTTECFFLCVMAYDRYLAICHPLHYPSIMTGQLCGILVSLCWLIGFLGHSISIFFIFQLPFCGPNIIDHFLCDVDPLMALSSAPTHIIGHVFHSVSSLFINLTMVYILGSYTLVLRTVL

SEQ ID NO: 39045 - protein, 278 aa, Homo sapiens [sequence omitted]

SEQ ID NO: 39046 - protein, 213 aa, Homo sapiens
MPRPNFMAVTEFTFEGFSIFEWHHRLILFVIFLVLYVLTLASNAIILIVIRLNHQLHTPMYFFLSVLSISETYYTVAINPQMLSGLLSPQQTISIPGCAAQLFFYLTFGVNKCFLLTAMGYDHYVAICNPLQYSVIMGKKACIQLVSGSWNIGLSTAIIQVSSVFSLPFCDANLISHFFCDIRPIMKLACADTTIKELLLCSSVSVSLFCPWY

SEQ ID NO: 39047 - protein, 767 aa, Homo sapiens; identical to SEQ ID NO: 16463

SEQ ID NO: 39048 - protein, 51 aa, Homo sapiens
MRPSVWAAVAAGLWVLCTVIAEGPPALPALALPLAGAPDAGGCQGAEGPLP

SEQ ID NO: 39049 - protein, 75 aa, Homo sapiens
MRPSVWAAVAAGLWVLCTVIAEGPPALPALALPLAGAPDAGGCQGAEGPLRGRGAELGAAQLLLPPQEGSSAAIA

SEQ ID NO: 39050 - protein, 123 aa, Homo sapiens
MRPSVWAAVAAGLWVLCTVIAEGPPALPALALPLAGAPDAGGCQGAEGPLRGRGAELGAAQLLLPPQEGSSAAIVLRSAPPRGPGHRGRPGSAQRPAPLGAAPRRRPDPGAAGGRGEGCGGLP

SEQ ID NO: 39051 - protein, 135 aa, Homo sapiens [sequence omitted]

SEQ ID NO: 39052 - protein, 2130 aa, Homo sapiens
MSAVGLVLLVLALRLRATTVKPEEGSFCSNSQVAFRDACYEFVPLGRTFRDAQSWCEGQGGHLVFIQDEGTQWFLQKHISQDREWWIGLTWNLARNGTTEGPGTWLDTSNVTYSNWHGGQAAAAPDTCGHIGRGPSSEWVTSDCAQTFAFMCEFRVGQSLACEGLNATVHCGLGQVIQVQDAVYGRQNPHFCTQDAGRPSDLEQGCSWANVKEEVAGQCQELQSCQVAADETYFGNLCPTQGSYLWVQYQCREALQLMVSSESFIFDNVTISLTWLLSPYIGNLSCIISTGDSHTFDPYNPPSVSSNVTHQFTSPGEFTVFAECTTSEWHVTAQRQVTVRDKMETLSVTACSGLSQSGAGPLCQAVFGDPLWIQVELDGGTGVTYTVLLGDITLAESTTQKGSLPYNLILDRETQKLMGPGRHRLEIQATGNTTTSTISRNITVHLVELLSGLQASWASDHLELGQDLLITISLAQGTPEELTFEVAGLNATFSHEQVSFGEPFGICRLAVPVEGTFLVTMLVRNAFSNLSLEIGNITITAPSGLQEPSGMNAEGKSKDKGDMEVYIQPGPYVDPFTTVTLGWPDNDKELRFQWSCGSCWALWSSCVERQLLRTDQRELVVPASCLPPPDSAVTLRLAVLRGQELENRAEQCLYVSAPWELRPRVSCERNCRPVNASKDILLRVTMGEDSPVAMFSWYLDNTPTEQAEPLLDACRLRGFWPRSLTLLQSNTSTLLLNSSFLQSRGEVIRIRATALTRHAYGEDTYVISTVPPREVPACTIAPEEGTVLTSFAIFCNASTALGPLEFCFCLESGSCLHCGPEPALPSVYLPLGEENNDFVLTVVISATNRAGDTQQTQAMAKVALGDTCVEDVAFQAAVSEKIPTALQGEGGPEQLLQLAKAVSSMLNQEHESQGSGQSLSIDVRQKVREHVLGSLSAVTTGLEDVQRVQELAEVLREVTCRSKELTPSAQWEASLALQHASEALLTVSAKARPEDQRRQAATRDLFQAVGSVLEASLSNRPEEPAEASSSQIATVLRLLRVMEHVQTTLLLGKLPGGLPAMLATPSISVYTNRIQPWSWQGSSLRPDAADSATFMLPAASSLSSLEGGQEPVDIKIMSFPKSPFPARSHFDVSGTVGGLRVTSPSGQLIPVKNLSENIEILLPRHSQRHSQPTVLNLTSPEALWVNVTSGEATLGIQLHWRPDIALTLSLGYGYHPNKSSYDAQTHLVPMVAPDELPTWILSPQDLRFGEGVYYLTVVPESDLEPAPGRDLTVGITTFLSHCVFWDEVQETWDDSGCQVGPRTSPYQTHCLCNHLTFFGSTFLVMSNAINIHQTAELFATFEDNPVVVTTVGCLCVVYVLVVIWARRKDAQDQAKVKVTVLEDNDPFAQYHYLVTVYTGHRRGAATSSKVTVTLYGLDGEREPHHLADPDTPVFERGAVDAFLLSTLFPLGELRSLRLWHDNSGDRPSWYVSRVLVYDLVMDRKWYFLCNSWLSINVGDCVLDKVFPVATEQDRKQFSHLFFMKTSAGFQDGHIWYSIFSRCARSSFTRVQRVSCCFSLLLCTMLTSIMFWGVPKDPAEQKMDLGKIEFTWQEVMIGLESSILMFPINLLIVQIFQNTRPRVAKEQNTGKWDRGSPNLTPSPQPMEDGLLTPEAVTKDVSRIVSSLFKALKVPSPALGWDSVNLMDINSLLALVEDVIYPQNTSGQVFWEEAKKREDPVTLTLGSSEMKEKSQCPKPKAARSGPWKDSAYRQCLYLQLEHVEQELRLVGPRGFSQPHSHAQALRQLQTLKGGLGVQPGTWAPAHASALQVSKPPQGLPWWCILVGWLLVAATSGVAAFFTMLYGLHYGRASSLRWLISMAVSFVESMFVTQPLKVLGFAAFFALVLKRVDDEEDTVAPLPGHLLGPDPYALFRARRNSSRDVYQPPLTAAIEKMKTTHLKEQKAFALIREILAYLGFLWMLLLVAYGQRDPSAYHLNRHLQHSFTRGFSGVLGFREFFKWANTTLVSNLYGHPPGFITDGNSKLVGSAQIRQVRVQESSCPLAQQPQAYLNGCRAPYSLDAEDMADYGEGWNATTLSNGSTRARTNVKGIPSGANSLCTGEEATWSPWGLIAKARQEFSAISLTTPGWTP

SEQ ID NO: 39053 - protein, 452 aa, Homo sapiens
MVAEVSPKLAASPMKKPFGFRGKMGKWCCCCFPCCRGSGKNNMGAWRDHDDSAFTEPRYHVRREDLGKLHRAAWWGEVPRADLIVMLRGPGINKRDKKKRTALHLACANGNSEVVSLLLDRQCQLHVFDSKKRTALIKAVQCQEDECALMLLQHGTDPNLPDMYGNTALHYAVYNEDKLMAKTLLLYGADIESKNKGGLTPLLLAVHGQKQRMVKFLIKKKANLNALDRFGRICQLLSDYKENQMPNNSSGNSNPEQDLKLTSEEEPQRLKGSENSQHEKVTQEPDINKDCDREVEEEMQKHGSNNVGLSENLTDGAAAGNGDGGLVPQRKSRKHENQQFPNTEIEEYHRPEKKSNEKNKVKSQIHSVDNLDDITWPSEIASEDYDLLFSNYETFTLLIEQLKMDFNDSASLSKIQDAVISEEHLLELKNSHYEQLTVEVEQMENMVHVLQK

SEQ ID NO: 39054 - protein, 498 aa, Homo sapiens
MVAEVSPKLAASPMKKPFGFRGKMGKWCCCCFPCCRGSGKNNMGAWRDHDDSAFTEPRYHVRREDLGKLHRAAWWGEVPRADLIVMLRGPGINKRDKKKRTALHLACANGNSEVVSLLLDRQCQLHVFDSKKRTALIKAVQCQEDECALMLLQHGTDPNLPDMYGNTALHYAVYNEDKLMAKTLLLYGADIESKNKGGLTPLLLAVHGQKQRMVKFLIKKKANLNALDRFGRTALILAVRCGSASIVSLLLQQNIDVFSQDVFGQTAEDYAVSSHHSIICQLLSDYKENQMPNNSSGNSNPEQDLKLTSEEEPQRLKGSENSQHEKVTQEPDINKDCDREVEEEMQKHGSNNVGLSENLTDGAAAGNGDGGLVPQRKSRKHENQQFPNTEIEEYHRPEKKSNEKNKVKSQIHSVDNLDDITWPSEIASEDYDLLFSNYETFTLLIEQLKMDFNDSASLSKIQDAVISEEHLLELKNSHYEQLTVEVEQMENMVHVLQK

SEQ ID NO: 39055 - protein, 232 aa, Homo sapiens [sequence omitted]

SEQ ID NO: 39056 - protein, 18 aa, Homo sapiens
MAAPSNKTELAWSPRLAA
